United States Patent Application Publication US 2024/0226191 A1 - sequence listing, part 8

SEQ ID NO: 28 - DNA, 3193159 bp, Mediterraneibacter faecis (residues 1,596,581-3,193,159 of 3,193,159)
caaaaatctgaaaccagaagatatcaagagacactatcaagagaaaaaagcaagacgccagagaatcctggaagaaagaagaaacagtaaatttgcgaagaagatgcagccggtttataagtggatgaacagattttcactcgttcttcactatctgctggcctgtgttttgaactttttgatcgaggtgatttcaaggcattccttttttgaagcatggagctacatgacaggaacaccactcgtgtttttgtttaacgcatttttaatatttgcaacatttatgattgtgtatttgttccgcagacgtgtatttgtcagaatccttctctgtgtattctggctgtttctgggagcatgtaacgggtatctgctcctgaagcgagtgacaccgttcaatgcgcaggacttgaaagttctgtcagatgctttggaactgacaagcaattactttaatggctttgagatcgtgatgctaaccattggaatcgttgctgttgttttgtgggtgatttccatgtggcgccgcggtgggcagtatactggaaagatgcaccgcattattgcagtgatcgctgttgtggcatccggatttgcctatgtagggcttactgatgttgcaatcgacaagagagtgatctcaaattattttggaaatatcgcatttgcttacgaagactatggattcccatattgtttcgcagcaagtttatttaatacaggaatcaatcagccggccggttacagcgaagagacgatggcggagatcaacaaggatggatgccttaacgtgagtgagacaagccgttcgaaagaggagctgccgaatatcatgtttgtccagctggaatcttatttcgatccgacagaggtagaatggctgagattttccgaggatccgatcccaaatctcagaaagctttatgctgactattcttccggatattttaaagttccatctgttggagcaggtacagcgaatacagagttcgaggtgcttaccggaatgaatatgcgtttcttcggaccgggagagtatccatacaagacttatgtgaagacgacacctcttgagagtgcggcgagtgcacttgcatctcttgggtatggtgcagaagcacttcacaacaacggcggtaatttctacagtcgtgccaaagtatacaacaacatgggatttgaccattatacaagtaaggaatttatgaatatcttaaagacgacgccgaagggatgggcgacagacgatattcttgttccgaacatcatggagtctctggatacaacagacggaacagattttgtatgtacaatcagtgtgcagggacatggagattatccgacagagccaaccttggaaaatccagagatcaaagtgaccggagtggaagatgaaggtaagagaaatgcatgggagtactatgtaaatgaagttcatgagatggacaagttcgtcggacagctgattgatgcaatcgagcagagaggggaaccgacagtgctcgtattctacggagaccatctcccgacacttggtctggaagcgaaagatctgaaaggaaaatatctgtacaatacgaattatgttatctgggacaacattggactggaaaagaaagacgggaatatcgctgcttaccagattatggcagatgtctttgatcgtttggatattcatacaggaactattttcaattaccatcagcagagaagacagacaaagaattatcttgctgatctggaattactccagtatgatatcatgtacggaaaacagtatgtatacaaggacagtggagctccgatcacagaaggacatatggtcatgggggtaaaggatgcgactatcaccagtgttgtggagcagctgaaaggaacttatagcatttacggagagaactttacaaaacaaagtaaggtttatatcaacggagagaaacagacaacaaaattcctgaacaatacaagattggatctgaaagagtcagaaatcaaagatggcgatcagatcatggttgcacagtgcggttcaagcaatacaatcttccgtacatcgaagacttatgaatatacaggaggccagcttgtagaagtgacagaccaggatacggatgttgagaatggaagacaggcctttgtagaacaaaaggaagaaaagaaaaaatgacctataaggaaatcgtaacctatatagaagaaattccaagatttacaagaaagcactctctggatcataccagagagatgcttctgtttttgggaaatccacagaatggaaagaagatcattcatgtagcgggaacgaatggaaaaggttctgtatgcgcttatctagatgcgatgctccgggcagaaggaaaaagcaccggattgtttacttcaccgcatctggtgaaaatgaatgaacggatcgttctgaacggaaagcagatcagtgatgaggatttctgcgaagtatttgaagagactatgcaggctgtccgcaggatgcaggatgcaggattggagcatccgacatttttcgaatttttatttgcaatggcgatgaaagcttatgacagagcaggaatggaatacattgtccttgagacaggacttggaggtcggctggatgcaacaagttctgtagaaccggtcgcctgcgtgatcacatcgatcggtctggatcatatggaatatcttggtgatacagtggaacagattgcgggagagaaagcaggaatcatccggccggaagttccggtgttttttgcacagacagcaccgggaagtgactctgtaattgaaaaaacagcagaaaaagaaggctgtttctgtaaaaaaatagggaaagatgcgtacgaaattctcggaattgaagataaacatattgcattttcctgcgcaagtgcttattatggaactaccacgtggaaattaaataatattggaacctatcagccggggaatgcactgcttgcgatggaagtgatgcgttatcttttcaaagaaaacggtcatccacaagagtggagaatagcacttgccagggtgaaatgggcaggaagaatggaagagattcttccaaaagtatacgttgacggagcgcataatgtgagtgctattcaggcatttgtaagaagtgtgccgaagaatccagatggaaatattattttattttcggcggtaaaagataaagaatatgaagaaatgatttcgtatctatgcaaacatgctgatgcggaagaatatgtagtaacattgatcgatggtgatcgtgcgacagacgcacacattctaggtgaactgttccggaaatatacagaacagccggtgactgtgattgaatctgtcaaagaggcaatgcagtatgtattgcggattcaggggagaagaacggtatattgtctcggttctctttacctgacaggaatgatcaaagagatcatacaggaatctttaagcggatgttgggaggtttgattgcagatgcttaattatgaagaagaacttagaaaattcaagccaagtctcgaggtggaccagattgaggaagctgtttacaaggaagatctgacagatatgcaggacatcgtaaaagaggttatggcaaagaaagaaaaaacggtgagaagatagaaagatagtggtgggtataaatggattacacaaagaagatcatgtatcagtcaaattcctggtacaatgatggactgcgcaaagcccaggtgagagatatgtccggggcaattgtttccttgcagcagagcctgcagtataatagggagaatattgcggcgcggaatcttttaggtcttgtgtattatggcataggggaagtttcagaagctcttgtggagtggatcatcagtaagaatctgtgcccaagagataatattgcggattattatattaaaaaagtacagaattcagcgaatgaactagaatcactgaatcaggcgattaagaagtttaaccagtgtctggtttactgtcagcagaacggggaagatcttgcgatcatccagttgaaacaggtgatcgcgtctcatccgacatttttgaaggcgtatcagcttctggctctgatctatatacagatgaatcagaatacaaaggcaagacagattcttatagaagcaaagaaattagatacaacaaatgaactgacactgacctatctaagagaagtcacaaaacagcgtggcagacacgggaaggatgcagagagaagtttccggaaaccaaaaagtgcagcagtagaatatagtcttggaaatgagacgatcattcagccaaaacgttctaagatccgggacatggcacagcagcttgcatttgccaatatattgatcggaatggttcttggtgctgctttgatctggtttcttgttgctccggcggtgaatcagaaccgctcggagaagttgaataatcagatgcgtgcatacagtgaacagatcaacacactggaagcacaggtgagtgcccagacaagaacactggatcagtatcgaacagccggagacgaggcacagaaagcagttgatcaggcaaaggcaacatctgacagctatgagaaactgcttcaggtttcaagtcagagccgttccggaaaatatagttatacggatatggcagacgcgctgcttgagattacaagagattctcttggagacagtggaaaagagatgtatgatacactttctgattctattttcccaacagcatgcaagagaagatatgcagccggtgtagattcactggaatcagaggactatgatcaggcgattgagtacctgacgaaggttgtgaagatggacgaaagttataatgatggacaggctatttatcgtctggcacaggcttatcagggaaaaggtgatacagagaatgcaaagacctggtatcagaagatggtagatacttataataattccagatatattgaggatgcgaaaaagcagcttgcaattctgaatggagatgccagtgcagatacaagttcagatagtagttcagtatcagaggactcagaaaattctgataactccaatcgctatgataattctcaggataatggaaattccgataattctgacaatacagaggataacgaataagattacgaaggaaaaggatatgcgaagaagcatatccttttttagcgtacggattcaggtaattaaatggaaaatgagaaaagcaggaggcatgaaaatatatgagatatcaggtacaggaaaattgtctgacgatctatcttccaagagaggtagaccatcataatgcagatgaaatcaggaaagaagcggatgcagtgatcagcagaaatcatatcagatatgtgatctttgactttgacaggacagattttatggatagttcaggaattggaatcattatggggaggtataagaccgttagtctgatcggaggagaagtctgggcggtacatacgaacgaaagaatccggaagattcttacattttcaggagcaacaaagattatgcagatttatgagggggaagattgatggaggcgagtaatacacagaataatgagatggagatccgttttgacagcagatcagaaaatgagggatttgccagagtatcagtagcatcctttttgacacaacttaatccaacggtggaagaagtggcagatgtgaagactgcagtgtcagaagctgtaacgaatgcgattatccacggatatgaacagcgagtagagacagtaaggatacactgtagtatagaaaaccagctttttacagtagaaatatcggaccgtgggaaaggtattgcaaatgtagaaaaagcaatggaaccgatgtttacaacaaaaccggaggatgatcggtcaggaatgggattttcttttatggaagcatttatggatagtgtggaagtagagtccaaggtaggggaaggaaccagtgtaaaaatgactaagacaataggtaaagggagcagaatatggacgacacaatcgctttaatcagaaagtcacatgacggagataaaaaagcgagagaagaacttgtcgagaaaaatataggtcttatctggtgcgtagtaaagcgattttacggaagaggtgcagaaccggaagacttgtttcagattggaagcattggactgcttaaggcaattgataaatttgatctttcttatgaagtacagttttcaacctatgctgttccaatgatatccggagaaatccgacgttttttgagagatgacggaatgataaaagtcagtcgttcattgagagagctgtcctataagagtctgcaggcgagagaaaagatgaccaggatactcgggagagaaccgacattgaaagaattatcagaagagcttcagatagattgtgaggagatcgtccaggcaatggagtcgtcagtggaggtagaatccatatataagccgatccatcagaaggagggaagcgagattcttctgatggataagctggaagaaaaagacagacaggaagaaaaggtgcttgaccggattgtattaaaagaagtactggaaacacttgaagcgaaggaacggacgatcatttatctgagatattttgcaggaaagacgcaggctgagataggaaagaaaatgggaatgtctcaggtgcaggtgtcaaggacagaaaaaaaggtgctggagcggatgcggaaagaaatgaagcggtagagtttaccatctcttccaaaaaaacaatcctgctccgattcctttccctaatgcaaccattaccacaaacactgcgagataccggacaatccttgcccgtctcataaaaatgggaaatacattcaatatttctgcaagtgccattgcccagcaaccaacaaaaatccctccgaaaagtccataaattgcaagaaatatcattcttccaggaagattaacttcaaaaatctgaaacaggtttccaaggattgcaccggctgctaccatatcttcataaattaaaatatgattgccggtatgggtacgatctgcaaaatctgagatcacaccaagttccacaatgaaagaaaagacaccgccagctactaccattccggcacttaaaccaagcaatgccaggaaaattatctgcaacaagttcattttccgacctccagttctttcttttgtcgtgtggcattttctactaaagttgtctggatatcattttcataaagacgcatctgtacttccatcggtgtaggatctactgtaaagcgtttcttaccaaaatgattaaaaaatattagaatcccgatcgcaagccctatggaatacgtgacttccagaacagaaaaaccatctgtcttctttcccatgatcagttcataaatctgaccaaacagcttcgttaccccaacatcattgttgaatgccatgatcgagaaggcagatccaaagaaaatcactgctgataccagtattacctttaaaatgtgccagagaagcggtggtgttttctgattttcataagtaacaataatatctgtttctcccagattctgaatctcaagtctgggatactgttcatgaatacaggcaatgattttcaacacggaaattacatagcgctgttctttttcctcccggatcttcaagatccgcaaagtttttactttcatcaggatggccttgtcggaacactccatattcaggaggtctcctaacaagatgttttgctttgatacctcaacattcctgtctgctttgagataaagagttgttgattcagatgccatggacgatcacctccagtttcttattcggtaacgaatatttcacaagatatccctcatcattttgcattttcttctgtccattccaataaaacagaccaataacaactacgcagagtaagagtatgattaaagcaaaccatctctttttcgttctgtttttcatttcatcagacctcctgaagtgtttttttacattatttgcagctttaataaaaatatacttacattcattttgtaatatcttgacaatcagtaaatcctgcactaaaataaatacataagcaaaaccgaaacgtttcggttttaaaaataaggaggacgatacgatgccattagttacatcagaaaagatgcttttagacgcaaagaaggatggatacgcagtaggcgcattcaatgtagagaatatggagatggttaaagcagtcatcgctgcagcggaggagctgaacgcaccggtgatgcttcagacaacaccttctactgtaaagtacggaacattggagacatttgcaggaatcgtgaaagcagaagctgcgaaaacaaagatcccggtatgtctgcatctggatcacggcaatagctttgaacttgcggttcaggcaatgaaagctggttacacatctgttatgatcgacggttcccacgaagattttgagaataatatcgcagtgacgaagaaggttgtagatgtagcaaatgcatttggtattccggtagaagctgaacttggtaaagttggtggaaaggaagacgaccttgaggctgatgctgatacgaacacagatccgcaggaagcgaaagaattcgtagagcgcacaggagtttcctctcttgcagtagcgattggaacagcgcacggattttatgtaggaaccccggttcttgacaagccaagagtaagcgcgatcaaagaagttgtagatgttccactcgtgcttcatggagcttccggattgagtgaagaagatgtaagagaatgtgtagagcgtggaatgtgtaaagtcaactttgctactgagcttcgtgttgcatacacagatgccgtgaagaaactgcttgaagagaagccagagacattcgatccgaagaaacttggtgttgttgcgatggaagccgtaaaagaacaggtgatcgcacgcatgaagatgtgcggatgtgacggaaaagcagaataaaacgagtaatagcttacaagatacagaataaggaaataagcttatgggtgcaacgatgaaagacattgcccgagagactgggcttggacttgcaacaatttcttcttatctaaatggaggaaatgtgcgtgagaaaaatagaatcaagatcgaagaggcaattgagaagcttcattttgaggtaaatgaagttgcaagaggattaaagacaaaccgaacgaagaccatcggaatcatcttgcccgagttgaacaacattttcttttcagagatcattacagcagcggaagatttattaagaagtcatggatatgcgacgatgatctgtgactgcagatccgatgtgaagcgagaagaagaggcggcagaattccttcttcacagaagagtggatggcttgatcatgatgccaaccggagcagagaagaaagtatttgctagatttagaaaatccagaagaccggttgtactgatcgaccgaaggatggagaacggagattgtgactgcgttcttgtagataatgaaggagctgcgcagaacgcagtgaaacggctgatgaaaaaaggccataagaagattggtatgatcacaggaccggataatgtatatacagccagagaacgtcaacgaggatatgagcttgcgctgcaagaatcatcaaaagctcaatcagaacaacaatcagatttaaaagacaaaacagatagaaaagatacaaaacttctggcagatggtaactacacgattgccggaggagcgaaagcaatgcgcaagctttatgaagacaatccggatatgacagcagtatttatctccaactacgagatgacagtcggagcaatgatggagatcaatgatcttggaattaaagttccggaacagttgtctgtgattggattcgataatgtggattttgcaagagctgtagtaccaagactgtcaatcgtgacacagccaacagaagagattggacaagcggcagcgaatctgttattgagcagtctcgaagataaggatgaaacatcagataaaacatcagacaaaacagaaacaacagagacaatctggctgaaaaccggattcgtagaaggagaatcagtggcggacatttcataaagaggaggagaccatgggagaatatttattaggaatagatatcggaaccagtgcctgcaagattgcagtctttacaaaagacggaaccgtcaaggcaaccggaaccggtgattatcaggtctattacccacatccaggatgggcagaacagaatccggaagaatggtgggaagcagtttgcaatgcaatcccaaaggtgctcgcaaagggaaatatttccccggaagagatcaaaggaatcgggatcgatgggcagagctggtctgcaatcgcagtagataaagacggaaatgtacttacgaataccccaatctggatggacacaagagccacagatatctgtgaagaattcaatgaaaagattgggaaagacaaggtcttcgagctttgcggcaactctttgcagccgtcttatacaactgcaaagattatctggtatcagagaaacctgccggaagtctatgcaaagacttataagatccttcaatccaacagttacattgtatacaaactgaccggtgtgatgacacaggacctttctcagggatatggtcttcactgcttcgatatgagaaccggaacctggaaggaagagatgtgtcaggcatttggattttcttctgagttattgccggaaatccatgcctgtcatgaagtgatcggtgaggtaaatgagaaagctgcgaaagaaagcggactggcggaaggaacaccggtcgtggccggaggactcgatgcagcatgtggaactctcggcgcaggagtgatccacagcggagagacacaggaacaaggtggacaggcaggtggaatgagtatctgtaccgaccagtatcgtgctgatgagcggttgattcttggatttcatgtcgtgccggattgctggctcttacaaggcggaacaaccggaggcggcggagtgatgcgctggcttgagcgggagttcggagcgtacgaaagagaagaaggaaaacgtcagggaaaaagctcactggatttatttaatgaagaggcggcagcagtagcaccgggaagtgacggagtgatcttcctcccatatatgtccggtgagagaactccgatctgggatccaaacgcaaaaggtgtttactacggattagatttcagtaagacaaaaggacatttcatccgtgcggcaatggaaggaacagcctatgcattgaagcataaccttgatgttgcggaagaagccggagcgaaagtagaagtcctgcgtgcgatgggcggatcagcaaactccttgttgtggacacagatcaagtctgacatcacaggaaaaccaattgttgttccatcctctgacacagcaacaacactcggtgcagtgattcttgccggagtcggaatcggaatgtacaaagactttgacgaggcagtgaagcttactgttgaagagaagcgttcccacgaaccgaataatgaaaacagaaaagtttacgataaaaattacgaaacatatatagaactttataaacaattaaaggaaactatggcgaaaaaccatgaataagaaataaattaacaaaagatcaaaaaaggaggatcttgaaaatgaaagcagcagttgtatgcgccaacgaagacgtacagtatcttgattacgaagaaccgacaccgggaccgggcgaagttaaggtcaaagtaaaatgttccggtatctgtggatctgatattccacgagtagttcataacggagttcatttctatccaatcgtacttggacatgagttctcaggagatgttgtagaagtaggtgaaggtgtaacaaaggttaaggttggagatcacgtatccggtgcaccgttgaaaccatgtatgaaatgtgatgactgtcagaacggaaacttctctctgtgcaaacattacagctttattggttccagagagcagggatccaatgcggactatgtagtgatcccagagcaaaatgcagttgtatatgatccaggcattccgtatgaacaggcggccatgtttgagcctgccaccgtagctatccacggtgtattccagaatgattatcagggcggacagtatgttgcagtactcggcggcggaacgatcggaatgtttacaatgcagtggtgcaagatcttcggatccaagaaagttgtagtattcgacatcagcgatgagagacttgaacttgcgaaacgtcttggagctgacgaagttgtcaacacaacgaaagagaattttatggaagaggcaatggcaatcacaggcggcaaaggatacggatttgtattcgagacagccggacaggttccgaccatgcatatggcatttgaacttgcaggaaacaaatcccatgtatgctttatcggaacaccacatgtgaatcttgagttcacaccggcaatgtgggagaacatgaaccgtaaagagttcaagctgacaggatcctggatgtcttacagcgcaccattcccgggcaaagaatgggagttgacagcacattactttgcgacaggacagctgaaattcgacaaaggatttatttacaaaatggttccgatgagccaggcacaggaagcattccagatgtttaagacaccgggacttgtacaggggaaagtaatgcttgtaaacgaagattaatcagagagggggacaagagctttgatgtgtcaaagctctgtaccgaatatgatacttacagtaacattaaatgcagcaatcgacaaaagatatgttgtggaaggctatcaggtcggtgaagtcaaccgtgtgaaagaatgtgcgtatacgccaggcggaaaaggattaaatgtatctaagccggcgtctatcgcaggagcggaagtggtcgcgacagaatttgtcggaggtcatgcaggaaattatatcgaagacgcgctgaaaccatttggaatcaagagtgaattctatcatctggaagaagagagccgatcctgtatcaacatatgggatgaagttaatcacgtgcagacagaatttcttgagccgggattcacggtatctgaggaagaatttgagggattcgaaaaacattttacagaactggtgaagaaagcagatgttgttgctatgtcaggaagtgttccaaaaggacttgacggaacagcttatcagcgtcttgtaagaatctgcaaagaagcaggaaagaaagtcatccttgatacaagtggaaaactgcttgagatgggaatcgaggcaaagccgacgatgatcaagcccaatattgatgagatccgtatgttgacaggaaaaagctgcgacaacttccaggacatggtagatgcggcaaaacagattcatgcagatggagtcgagatcgtggcagtgtcactcggtggagacggttcttttgtcgtatgtgatgatggaatcttccgcgcacgcgtgccgaagatcgatgcggtaaacacagtaggatgcggagattccatgatcgccgggttcgctcttggacttagcgaaggactttcggttgaagagacattgaagaaagcaagtgcgatctcagcggcagcagcactcagagaagaaacaggattcttcgtaaaagaagatatggaaaagatctatccacaggtggagattgagaagatcggttagattagataaaaggagaattatcatgggtgaatttattaatccggcagatgtgccaaaagtaaaattctacacaggtgatgaagcaccatgtatcggaatgggaacatttggttccgacagatttacagcagatcagattgctgaagcagtagacggagcaatcaaaagcggataccgcatgtttgattgtgccgcatgctacggaaatgaaccggagatcggtaaagtatttaaaaatgcatttgatgagggaatcgtagaacgtaaagatctctttattatgacaaaagtatggaacgatatgcacgaacatgtcgaagaagcttgcaagaaaagtatcgcagatctccagtgtgattatgtggatatgtattatattcactggccattcccgaattaccatgcaccaaaatgcgatgtagagtcaagaaatccggattctaaaccattcagtgtggaagaattcatgaatacatacagacagtgtgaaaaactcgtcgaagacggattgacaagattcatcggaatctccaatatgacgattccgaaactcgaagcagtacttccattgatgaagatcaaaccggttgcctgtgagctcgagatccatccttgcttccagcaacaggaactttacgattacctcgtagcacacgatatccagccggtaggttacatgccaatcggttctccgatgagaccggagagagacatgtgtccggaagatgtagcagatctgcagaccccggttatgcaggagattgcgaaggctcataactgccacccggcgatcattgcactgaaatgggcaagacagagaggcgagatcgcaatcccgttttcacttcacaattatgtaagcaacttaaaagcaatgacagaagatccgctgacagaagaagagatggcgaagattgcaacactcgaaaaaggaaaccgccttgtaaaaggacaggtgttcttgtggcatggagcaaaagactggcatgatctttgggatgaagatggagaaatcgtgacattgtaaaaaataagataaaatgatgttgagagatacagttcttgtaggaaggtgagactttttacaggaactgtattttattataaaaaataatttttttctttgaactggcatacatttaaaagttgaaaatatactccttaaggagtatagtaaaaacataataagttatcacggttacattatacgtggtcagcgacttaaaaaagaatgaagtagaaagaaggtgtccctttgtcaaaacaaatgaaaagaaaaatctatcatggttcatccgaaatcattgagaagcctgagttcgggtatggaaagccatataatgattatggacttggattttattgtacagagcagattgatatggcaagagaatggggtgtgtccaaagaggaagatgggattgcaaactgctatgaaattgattgctcaggattgaaaattctgaatctgaatgatgaaaaatactgtattttacactggctgtcgattctgttggagaatagagaattcgaagtgtcatcagctcttgcagcagaggcgaaagaatatatcctcaagaagtttaaaatagagtatgaagaatatgatgcaattgtcggatatcgtgcggatgacagttacttttcctttgctcaagatttcattaatggggctatttcctatcggcagttaaaccgggcaatgcatcttggaaaactgggacagcagtttgtactgaaaagcaaaaaggcatttcagcagattgaatttaccggttacgaatcagctgcaagtaaagaatggtataggaaaaagatgttgagagacaggtctgccagaagagaatattttgatgtagaacggaataagagacaaaaaggagatttgtatataatacagatcatggatgaggagatgaaatcagatgatttgtgcttacgatagagtttatttggagtccgcacgaaggaaccttgcgagaatgttggattttgctgtatatgatatgtgctatgatttacagcagttttatcactggtttttgatgtcgggaatagcagagcagtttggaagcggtgactatagattccttgccggtatgtctggagtagaactggcttatgaagtactggatgtatcacagatcgcctatgagcgccggaaaccatgttattccgcgaaccgcagtgaagaatattggacaggctgggcattagcttattatcagtgggagacatcccttacattcagggaaatagaaaagtatattccaatcacagaagtctgcggtttgtattcaccgtaccatgaaatggatatccgtcaattctctgataagatgaatgaattatacatgaaagcaaagaagggaacaagtctgaaaatattacggaaatatgcaggaatgagccagagagaactatctgaattatccggggttccgttaaggacgatccaacaatatgagcaacaacaaaagaatattaacaaagcccaggtagaatatttagtgagattatcgaagacgttatactgtgaaatcacagacttattagaaaagacaaaatagtaaaaacagagtagaaaaaaggaacggattttctgcatgaaataaaaaagttgacatgcacacaattttatgatattatatcgctcgtaacatttttgtaataattgtaataaaaatgaaaataatgcataatattaataaagaatagcaattaaatggaaaaaattatgcaacaaaattgttaggagggtatatgaagtttaataaaaataaaaggatttttctggcgatgtatacagcaatgatgagtgcggtcatgctgacgggatttgcaagttccacggaagcacaggagcagagcgttgcagaagcagaagtgtcaacggaggcagttgagcaggaagaaactttagatgacacacggtttgcagagggtacaggtacagactggggtgtatcacaggaagtgatcgatgtgcagtcagggatgatcgagaatgtgaagattgcggcagctgaagcgaagattgcttatgaagcaaagctggaagaagagagacgtgcggcggaagaagcagaacggatcgccagagagaaggcagaggcagaagcggcagcagcggcacaggcagaagcagcggctgcacagcaggcagaaaaagaactgctggcatccctgatcttctgtgaagcgggaaaccagccgtatgaaggacaggttgcggttggagctgttgtaatgaaccgtatcaatagttcctcttatccggatacaatggaagaagtaatctaccagtccggtcagttctcaccggcaatgtccggatggcttgaccgcgtaagagcaaaccagggctatacagaggctgcgatgcaggcggcagaagatgcactcgcaggaagcaatccgattggagattgtctgtatttcagtgtaggcggttacggaacacggatcggagatcacttatttcattagaatgctccactcacaacatctgctcaaacagagtcgatcagatactgtggaatccttttccgataatctcacttgtattagagattagaataaatgcctttggatcggtcatcttgatgaaattacgcaggcggacagcctgggtacggttcagtgcagtcaggacaatcgctttgtcctgaccggaataagcacccgttgcgtgaaagacgctggcactgcggttcagctcatgaacgatgaaagcacagatcggttccgggtcgtcacatacaacattaaaatatttggacagattaaagttctcgataaaggtgtctaccatgaaagaacgaatcgtaagtccgagcaaagaatataatccagttttgatatcgaagataaagaatccggcaatagtgatcaacagatcagaaagcataagagccggtccgatattgaagctggaatatttttttaaaatcatagcaataatatctgtaccgccactggaactgccgatgttgaacaaaatggcagagccaagagcaggaagtgcaatcgcaaaacaaagctccagcatcggctggtcagtcaaaggagctttcatcgggcagacgcgctccagaaaagaaagcgttaccgagagcagaatactgcaataagctgtcttagctgcgaatttcttaccaagaacaatcattccgatcaacagaagcgtcatactggcaacaaagttgaaatcaccggctgtcataagtcctgtctttgcaataagaacagcaagaccggtgatgccgccaaaggtaaagttattcgtgaacttgaaaaaataagtaccgatcgccatgatcagtgtgctgactgtcagtaaaagaaaatgtttccccttgtctaacataaataaattcctccccaaaagaaaaatgatagctttcgtgtgcaacatccgctataaaaagctgtcataaatgtttgtacatatgattgtaagcgctgaaaagtgaaaagtcaacgcatgaagttatccaaaaaaggaaatactgaaattaagcaaagtacgaaaacagcataccaaaatagaacgaaaagcactgaaaaggaggttttagagtgtggaaccagaagttagaaataagctggatcttgcagtagaaatccgtgatgtttatgcaagagaaattcttgatttcgccggaaatccggccattgaagtagaagttctggcaggaggagaaatcataggaaaagcatctgtggcaggaaaaaattataataaaaaagagcagacagaaaaacagcagatggatatcgaaggaaaaatcgaattgcttaacagtcagattgcaccggaaataatcggtgaaaatgtatttgaacaaagaaagattgatacaattctgaaagaaaacggaaatgaacagacatcctttgcaatatcacttgcagtggcgcgggcagcagcggctgcagaaaaaattccgctttacaggtatcttggaggtgtacgtgcagtacatccaagtatgccgcagttggtcagaaaagaagaaattgagatagaaaagataaaagaaattaaggtagacgagagtacgattcttacgaaactgtttgaaagaatattagaagaacagaatgaagggaagaagctgattctcagtcaggaaacagcaggaacagaagacaactttctggtagatcttgcagttgcggcgaatattacgctgattttggttgaaaacagagaaagcgcttattatacagtactgaacaatcgattgttacaactggaagagaagattggtggatgagaagacctcaagaaatcagggagaaataaataatgggagcatagctcccaattgttatttagcgattttattttacactctctaaatacatctctgtcagttcaacagcatctgcaatacactgaggacatgggacaactttcccctttccagagactccctttaagtcacgacaataataggttccgttcttttgacggaatttttctgcaaattcctttgttttcttataggtatctgctttagtagattttccattttcaagatttccgatgctgttgtccattccaataaccatcatcataccggttacagctccgcacatgtccatcatgcccatgccaaatccaaatccctcagagattttaaacattgtttcctggtctacaccaaattcctcacagaaagaacaggctacagcttgtgcacagttataccctttgccatgtagttctaatgctttttccacttttgtactcatttttttctccttatgattagaaattcccaacttattttttgattttaaattgtttttattatagcgctcttttctgtttatgacaattggtattacggattttgaaagaatttgaaagaatgaaatcaaaggaagaatatgatattataaaaataaaaaacggaatttatagagaaaagcacctgtcaaagaagctttgcgtaactgtatatttcaaatgtataaagggaggcgaatgaggtgaaaatcgttcgaggaataaattttatagaaggaagcagagaagaagaattaccaaattttgaatcaaattttccgtatatcgcttctcgtgtagaattaaatcaatatgaagaagatagtattccatggcattggcataaaagcgtagaagtgttttatgtagagcaaggaaacctagaataccgtacgcctaacggacattatatttttccacagggctcaggaggcatggttaattctaatgttcttcatacaacgaagccaaaagaagacaatacggtacagctaattcatatttttgacccatcatttattggcggtgaaacaggaaatataattgtgaaaaaatatattatgccaattatcacatctggagaattggatatgattccattatattctaataatttggaacaaaaagaaatattagatcttataaggaatgcatttaatttatcagaaaaggaatttggatacgaactaaaactgcgtgagcgattaactgaaatttggctatcacttttcaaagtgtcattttctgtgattgaaaaaaagaaaactagtacgagagcgaacgacagaataaaattgatgatggtttatgttcatgaaaattttgcagataaaattactgtttctgatcttgcaaaagttggctacataagtgagagagactgttttcgagtttttcaagagtgtcttcacatgacgccgatagaatatattacaaactatcggctgcaaaaagcctgctatatgttagtacatagcaaagatactatttctgcaatcagtcaggagtgcggattaggaagcagtagctttttcggaaagacttttcgagaacatatggggatgacaccaatggaatatcgaaaaaaatggcggaatagtgatatataaaggcattaaaaagatattttattctttaaaattgcagtatgatgataatcaagaacaaaacatatcttttatgaaaggataatgtttggattggaagtggtagcattctcttgccgggagttacaatcggtaaaaataatgttgcggctagcaatccatgtagagtaattcgttgcataagggagtagaaaagaaatgaatcaggtaaaaattattttttttgatattgatggaacattgttggagatgggaaaaacagagataacaccgaatacgaggaaggcgttatgttcattaaaacaaaatggtataaaaatatgtatcgcaacagggcgttcgtttgctaccataccaatgtttgagggagttgtatttgatgcgattttggcatttaatggatctttctgcgttgcaggtaatcaggtggtggcaaaatgtcctattccgaaagaagatatagaaataattattgaaaatgcaaagagaatggaaagacctgtttctattgcaacagcggaagagattgttgcaaatggaagcgataaagatttagaagattattttgcgattgcacatcatagggtgaatgtatccgagaaattcgaagaatatgtggacaaagatgtgtttcaaatcatgttgggatgtgacttagaagaacgtaagtatatattaaagggaacgaaaaatgccaaattagcagcgtggtgggatagagccatagatattattccaaaagaaggtggaaaaggagctgcgattgaacaggttcttgcacattataaattctcaaaggaagaagccattgcgtttggagatggagaaaatgatattgatatgctactatccgttggaaaagggattgcaatgggaaatgcatctgaaaaagtgaaagaaattgcgactgatatttgtgaaagcgtgacagatgatgggatttattattatctgaaaagccagaagataataaatgagtgaaaggtaggtgggaaaaatatcgcaaaaaaaactataatgcaagtgtaaagaaaaaggaggtaaaaaataatgagcaaaatgaaaaaatggttaaacaattggtttaaggaatctgtagaattttatggttcaatgtttcgttatggaatttattatagataggacagaggaagaacacaaactatgaaccgtacagagaatcaaaaaaagcaaggtatcatgaaataaagagttgcatcttggcaaaaaggtgtagctctttttttggtggaaaaattgacagaagataagagaatcgaattgcaagactctatcccctaaaatgctgatatttgttgaaaaatcaggctttttgcaagcaaaaatgaaaaggctatatataggtagcctgcgaaactggaattgcccattttgagcctgattttaagaataatgtcctgacagagagcaatggaatgattctctgcccaggattcaaaaggaatggaaaaaatgcaggaggaaatcaaccgaatgctggttacagaagcaagccgaatggcaatgtattaaaattaggtggatgtaattgaagaaaaatatgatatcatatgagtaataaaacagaatttaaggaggagactgtaaatgaaattatcagatttagcaacaggttctgattggacagtgtggattgtctttgtgatatttgctgtactttctattattttactttctggacacggaagctggttcatttctggatataatacagcttcaaaagaagaaaaggaaaaatataatgaaaagaagttatgcagaacaatgggaattggaatgtctattatagcaattcttctattaacaatgggcttgtttgaaaatattttacctgcattttttgtatatattgcatcgggaattattttggttgatgttgtggtaattatcattttaagcaacacgctatgcagaaagtaacaatttccagcttgtatgtaaaaaacagaaaaaatgtagatattgtggcaaagaattagatagtaatttggaatgttgtagcagtgagtgagaaaacagctatagaaagataattgaaaaagatagacataaaattaagtatttcatttcgggcattattttagggtttttagctatgttttatggtgttgtgtcaagccgcaattgcatgattggaagtggaattatagtaatgggggtcacagttgttgtgcttccatttactactccagaaacaactgctttatttggaaataaaaaggcgagatatatcggaagaatattaggtatgatacttatagcggttggaatatgggtagggtttatttgatgacaacttcagtctttagagcaaattaatcagaagttgagaggaggtctctataatgtttatatttttatctgtgtgttcacttttagtaccgttatctatgattatattgggatatacgtggaaagataactctcctaaagatcggcaggggagttcgggatatcgaactactatgtcaaggatgaatgatgaaacatggagatatgcacacaggtgttggggctggataaactttgttttaggaatcattctggtgatactatcgatttttattttgattttaacgaaagataatacaaactttgaaatgatttctgtttatttggtgtttttacaattaggaattatggtgcttacaattattccgacagaatttttgttgcataagcattttacaaagcaaggaatgaaaaaatagctaacttccaattggtgaaaatgaaaatcggaattttatgaggtgagttatgtaaaaagcaaaagcaattaatattttgggagaattttgtggcaagcgtgatatagaagaatttacacaaaatgtattagaaaaaaattggaatcaatcaggctgatgtaatggttttatttggaggaagcattatagccggtggtgatattcttgctgaagccattcagaacgaagtggcaaagaaaaatattattgtcggaggtgctggacacacaacagagacattgagaaatgttgctggagcaacagattattttagggaatttaggttattctattttgtaacaaggaaagatagaaaggtgtggatgtttatatggcaaagaaattagacttaaacaaaccagtatttgaattggttcaggaatatcctgagcttgtagatgttttaaaggatttaggattttcagagattacaaagcctgcaatgcttaactctgtgggacgcatcacaacaattccaaagggagctaagatgagaaacatatccatgatgaaggttgtgccggcacttatgagtaatgggtttgaacttattgggaagatgccaaatatctttgcacttggaaagaataatgcaggagacgagaccagcagtgaagatggggcttttcaggaaaatacaagagaaaagataaagagctatttaaagcgacttggagaaggcgaagacttagagagtgtgcgcaaagacttcgtagagaatttttcagaggtagaggcatctgaaattatgaaagctgagcaggagctaattaaggaaggcacaccaatcacagaagtgcagaaattgtgcgatgttcacagtgccttatttcacggtgcaacaaaggaagaaaagattgcaaatgcagaaaaagcagtagaagagtcacttaagaaagaggagacatctaagaaactgatgccggatgcatacaatcagaagcatgctgcagcaaagactcttagagaaactgttggacatccgatgtatcgatgggctcttgaaaacgagaagatagccgcattgattcatgaaattcaaggggatattgagtctgggaatgatgtaggagagaagctatctgagcttcgacagatttctattcattatgcagaaaaaggagatcttgtctatccggtattaaaggtacgctatgagatctcaggaccttcggatgtgatgtggacagtggatgatgaaattcgtgatgagctagctgcacttgataaaatatcagattatgatgaagaatggatgaaccgacttcagacagttctcaaacgagcagatgagatgatctataaagaaaataatattttataccctatctgcgcagtgaatttcagcagggaagagtggtatggcatttacgaggatgctaaggactatgcacctgtgtttggagtagaaatgatctgggatgaggcagaaaaatatagtgctgataaaaaagcaagaacagaggcggctctaagcgatggagaaatcatattaagtggtggtcatatgacagttccacagctggaagcacttctcaatacattgcctatcgagattacatttgtggatgataataatatcaatcgcttcttcaacgaaggaccaaaggtgttcaaacgccctcagatggcgattgacagggaagtattttcttgccatccacctaagatagaaccgatggtgcgagcaattttagatgattttagaaataataagcgtgacagagttccagtttggatggagaagaatggaaaaccattccttgtaacatatatggcagtaagagataagaaaggcaattatcttggaacggttgaagtagtacaggatatgcagtttgcaaaagagcattttgaacaataaggagggcaaggatatgcaccgaatcgtgtgattagatcaggaacggttctggatacagcaagactaaaagaacgtctcggggagcatctggaagtagatagtcgaagtgttcatgcgtttattgttggagaacatggagacagtgagattgccgcttggtcaagtgccaacgtgtcaggtattccactccatgatttctgcgagatgagagggcatcatgaccatgaaggagctaggtcagaaattgcggagaaagtaaaaaacagcgcctatgaaattattcaaaggaagggtgctacttattatggaatagcaatgtcggtaaagagaatatgtgaagctataatcagagatgaacgttcgatacttccaatttcaacaatgatggatggagaatacggaatcaaggatgtagttctgtctatgccaagtattgtaggtgcagaaggatttatatcaaaggttcccatttcactatctgaagatgaaatcaaggcattacacaaatcagctgaaacactgaaatcagtgctggaagaggcattggaataaaattgttgtgaaatcgcatacagcgtatgtggcaaaggggatgggcgcatccccttttttctatagtaaaagtttcatttttttatcgttaacttctataagattttcatcttgcatacgaccaagttctctggacagtgcacttcggtttacacctaagaattctgcaagtgctgtctgtgtaaagggaacatggagatacccttctgagtctggcgctaaactatgcaaatagattagaattcgatctcttaaagatttctgatttgcaattcttagttttagatttgaaaaaacattttgtgaggcaagtattttgagcatgttagtggttaaattcagttggtaagagcatggacaggaagaaccgcttataatacctttaagattaattaacataatggtgcagttagtcaatgcttttagctgtattggactgtatggtgtttgcacgcatgccagggcttctgcaaatgatcgaccacgttcaaaatgattcatattgattttgctgtagttttcattgataaatgatccttcaactgttccatcaagcacaattccggaatataacaaaggttctcctaggtgttgaattaattcgtctttttcaaaagagagaattgaggcctggaggaagttgaaaatttgcggatagtgttcaagaggaattccttcaaatagctttgctttcgatagtatcggaagatacttctgataatcatctagtttcttcatatgcttattaccatcctttcaaatgaaattttatcatatcatcgatattgttgctacagcaacagaaaaacaagaggtctatggataaaataatagatgtaaagaagagaaagagaggtggtaacgatgaaagaacaagctggaaaaattatagattttgtaagagaaaacagaacagtgccagggtgtaccatctcgaagcaaatctatcatgagaatggcacagggatatcaattttttgcctggagaaagtattctaacacctattcaacggtcggttggagttagtgcaataaaagattctatatataaagagattgaatttcgaaaggagactattatgaacgaggtaatcaaggcgggagaagtatttaagttagcagagttacttccatatcaggaaggaaagattgtaaatatggatttggcgcataatgacaagatgaaatttgttgttatgagttttgatgcaggaacaggtctttcagagcatgcagctccgggagaagcccttgtgatggcacttgatggagaggctgtgattggatatgagggacaggagcaggtgatccacgcaggagaaacttttaagtttgataagtttggaaagcactcagtaagtgcaacaaagcagttcaaaatggcactgttattggttcttgagtaaatatgaggagatatcgctatgaactatttagagattgaaaaagtaatcggaagacagattattgattccactgccccattggaaagcagcaagtgcatataacgaatactgtgagcggggagtggcttttagtccatcctctgccttattacagtcaatgcgtaacatatatccggcagatgtataaatgtcaatgctgttgtgatacatgttgtattttgcgtaaatggtattcatgttgtgtctccttcaaatcaataaaaatatagaagcatttcaatcagttcaccatgtcattttcattttatgttataatgtgttatcagattttttttgcccttgtattttcccttatcagagttcgtaaacttatatgggaagatataacacaagggaaacaataagggaaagctcacctgcgacaaatccagcgttttcaaaggtttacagtgaatttaataacaaaatataacagttattaaatttcctaaaacaggtgaaatctcaatcggaatttggaggagcaacatgaattcttataaattactctttgattggcaaatttctatgccagataactggcaaggcgaatacgataaagagagtggtcagtatattttttctagctaacaatagtgatttgacaattcgtataacaccgtttcacgcagaaagggaaggcatgcttgcaccaagagaagtaatggaagatgcatatatcagaacagtaccagtatctgcaagacagcgaaatttagatttctgcattccgagcggatttgaagcaaagatatacgaagatgtattgacaaaagatagcaacactatttatgttgtttatgtggggtattattctgcaggtgaattattgtctatcagcgtatggagtaccaacaaagatgaaggtgaacaagctttaaatgttcttaatacaataaggaagtaagcaatcgccaaattctagttgatatttcacatattttaggaaatttaataactgttatatttgattatcaaattcttcgcaaacccttgaaaatactaagtttgtagcaagtgaactttcccttactctttcccttgtgttacattttcccattgcttttcatgaaccttaatatgggaaaaattaagggaaagaaaatttcataacacaatataacatataacaataacgacatggtgaactgattgaaatgttttcgatatttaactctgtaactgattatcaaaagaaaatggagataagatacgatgagaacaatttatgcagaatataatataaaccacgatagtattgatgtttacacaagtgctggatatatgcttcgcattgattgctgggaagctgaaaaaaatttaaaaaccacatatggatcagaatgtgcgcttacttcattggctgtggatgagcctttggaatatgcaagattatatcttgatggcaatttacagatgtgggtggatgcagaagattcattagaactttattaagcaagaagtgagatagtgttgtagggagtttcctgtagttaaagataccacacccgatatgatgaacccacgcttatacactaccagctatgataaaagaaaggacagcaatttgacactgctgtcctttcttttataaaattgcagtacacagaaaaaagctgtaaaatgaaaaatatatttgtccttgtaacaattctcggacatttgcctgttatactatctgcaaaaagaaaaggaagtgacaatatgaagcagattttaattgtcgaagacgataatcttttgaataaaacgcttacttataatttggaattggacggttacacaataacttctgttctgaatgcaaggacagccgctgaatcattaaaaacaaacatttttgatttggtattgctggatataaatttaccagacggaaatggttatgacctatgccgtcttatcaagccagagcatcctgatacagtagttatatttctaactgccaacgatcaggaaagcgatcagatacgaggatatgaagctggtgcagtggattatatcacgaaacctttttcgattagtgctttgcagcgaaagatcaaagccatgttcgctatgttggaacatcacaaaccagctaaggatatttacgaggatggtagcctgtttctggatttttcggaacaatttgcaagtttgaacgggaaaccattagcgctttctgcgatggaatataaaatgctgaacctatttcttaaaaatccgaagcaggtacttacccgccaacaacttttggaaaggctgtgggacattgatgaaaaatatgtagatgaacatacccttactacttctatcagccgcattcgcagtaagattgaagcggatggcgacacatatatcaaaacggtttacggtatgggttatcaatggacaggaggcgaaaagaaatgaaactgaataacctttctgctaagaaaatttgtagactgattagtgctggcatggttttctctatgctggtaattactggtattttcggcggtataatgcaggatacacgaattttcatagcgggtggaacattgacactctgtgcatttttctggatttggctattggtgctgttttttggaaaacgcctttctcatcttacttctaatttgtgccggacgctggacaacatgattgatggaaacgaggaattacaaaagtcaaatgatagtgaaactctttttgcccgtatcaaccaccgcttaatccggttgtatgagattatgcagaaaaaccgacacaagatagacatggaacgacaggagcttcaaatgctgatttctgatatttcgcatcaagtaaaaacgcctgtcagcaatttgcaaatggtaacggacacacttttaacaaagcctgtttcagaagaagaacggatggactttttacaaggcatacgcagtcagactgataaactagattttctgttccaagcactggttaaaacatcccggttggaaaccggagcgatacgattagaaaagaaagacagcagcttattccatacgcttgcacaagccatgagcagtatagtatatgccgcagagaaaaaagaaattgctgtatccgtggattgcccggaaaatttgataatctcccatgatagcaagtggacaagcgaagcccttttcaatctgctggacaatgcagtaaaatacactccgtcaggtggaaagatttctgtatcagtggttcagtgggaaatgtacgtagaggtcaaagtgaccgacaccggcaagggcatttcagaaagcaatcaggctgccatcttccggcgcttctatcgtgaggaagaagtacacgatcaacagggtgtaggaataggtttgtatttggctcgtgagattgtaacaaggcaagggggctatatcaaggtcgtttcagagctggggcaaggctcagaattttctattatgcttcctgtaaggtaagatataaccactttttttgaaatgtccgagcgttgtaaaatttcaccctgattttcgataaaaattttttctatctcggacatttgtgtaacatttgtggtttacaatggctttatcaacagatagaaagccttgaaaggagcatttgaatatgaacattttacaaacaatcgacttaaagaagtattacggcacagaaccaaatattactcgtgcccttaatggtgtaaattttactgtggaacagggagaatttgttgccgtagttggaacttccggcagcggtaagtctacattgcttcacatgatgggaggacttgatacccccacttccggcagcgtgattgtacggggagaagaactcgcaaaaaagaatgatgatgaattgacaattttccgccgtcgtaacatcggatttatcttccaaaattataatctggttccgattttgaatgtatatgaaaatatcgtcctgcctgtggaactggatggcgatacagtagaccagaaatttatggacgaagttgtgtatatgttggctttagaagataaactggaaaatatgccgaacaatctttcaggcggtctacagcaacgtgtagcaattgcacgagctttaattacgaagcctgcgattatccttgctgatgaaccgaccggaaatcttgatagcaagaccagtgcagatgtgttagggcttttgaagcgtaccagcggagaatttaatcagaccattgtaatgattactcacaacaacgagatcgctcaactcgcagaccgcattgtacggattgaagatggtaaaattgttggctaaaggaggtgggaattatgaattatccttttgaaaatgataccagtgcagtaattaaaaaattagcacgaaaaagtgtgcgttttgataagaagaaaaacttattttgcctttcggcaattattgtagccgttgctatgataatgatgtcgttgctcacagtgcaaaatatcatttatcaaaatcagaaagaaatcgaaggattacatcaagggattttctttgacattacgcaggacagtaaagaaaagttgttagcaaacgaagaagtaaaaagtgtaggactttcctgtaatatcaaaacagtgaaagaaaattctaaagaactgtctctgatttattatgatgatgacatgcttagtttgattcctgcctttgacggaaaatatccagagaaagcaagtgaaattgctgttacagatgccttttttgccagtgaaaataagtctccggaaatcaacgccatagttcagttgaatctggatggtactttgaagaattatactattgttggtatttatcatgataaaacttctaccgcttatcctgtttttgtttcacttgaaaaatgccgggaattacgtggaaataacctgcttaatggatatgtttggcttgaaaatgcagatacccttacaaaagacgaagcaacagaaatattatctcaaatttcagaggagactggactgaataattggacagtcagcagttactatgattatgtaaatacaactttgtccttcagtaattatgcggtatatggtgtagttgctgccattttgtttttagctgccgcacttgtaatttacagcattttctatatttcggttggacaaaaagttgctgagttcggacagcttcggacaataggggcaagtaaaaagcaaatttataaaatagttcttaaacagggttatatgcttgcagttccggggattttaattggtagtatcatgggaacgatcatcagctattgtctgcaatcaaaaggctggtcagtatttgcatttattgtttctctatgtggcgcatgcctttttggaatactgcttgtttatattagtgttcgtaaaccagcaaaaattgcagcgaatacttctccaatttccgccctgaaaagtccagtgggaattgtaaattaccgcactcacaaaagacatcgtattacgcctgtatatttagcgaaaatcagcttttccagaaacagaaaaaaatctctattgaccattttatcattgggactgtgcggagttatatttttccttgcagcaagttatcagagttcttttaatgccgaaagtatggctcgttattgggatatgaagtacggagatttcaaaatcagcattgatttagaaaacgaaagtgaaaatctgaatgctctcttgcagaaagaatatttttctgattatgtaaagcgtgttggagatatagagggagttagcaatatatttacttatgctaccgtaccagttgatttctcaacagacaatgatatttcagatagcaccttgatgctcggctataatgaaaaggatttggcgtcactaaatgcagcggttttgtctggaaatattactgatgatacagaattagttgtaagtgatcccgaacgtatttatgatgtttaccattggaaacctcaaattggggatactgtgacctttaatttcaaaaatcatagtggtaaaacaataacaaaagcattcaaaattggtgcaatcacttccagcaatgatggaatggatggctatattttcagaatgccggaagatatgctcaaagaacttgcaggttatgactgtacatacgcaatcgaaatacaagcagaagctgaatatcaggagataatcgagcaagaactcaaattactcgtttctgacaatagggatgttcgcttacaaacccttcaagattttattgtagaacaccaatcagacaatcgtgcaggttttacattagcttatgcgattgcagccatcttgtggatatttgcggtcatcaatcaaatcaatcttactgtgacaaatcttttatcacagaaacaggaaatgggcacactaaaatctattggtatgacaaataagcagttggagcaagcatttatgatggaaggtctttttactactttgattgcattgcttataactgctgttgttggaatccccggcggatatgcaatcggtatatttttgaaaaatgcaggcatgtctacgggatttgtatttccggttgttgcttttactctttttgctgttgctatgtttatgcttgaaagtttgatgacaatattgcttattcattcatggaagaagcaatctgttattgcaataatgcgaaattgacgatagaaagtttttcatatctcggtcagctcaacaattacattactctgctgatacagccagtccgtaaattctttcgggctggctgttcctgtttttacagccttttttctctgtaatacttcttttcatacagtaaattttcactaggctggtatggagtaattttactgtctatacagtaagttgaaaatactaatatggtcttttttctaaccaaactttaagataacatctaattccaacatatgtgccctgcgaaagtacgaaaagcaatagaagatttactgacagtacttttttgattgattctccaaaataaatgacaatagcaacacttgtcagtatcattagtagagtaataacatcccaacagtttttcttatataattctataacctttatttctatcagtatcgccagcatccctgttcctgccatacatattcctacaatcaatattagcaataaccaatataccattccggctataaaagcatttggaatttttgtactaatctgtgccgcagaatgcccggcatcaatcgtccatccgacaaaggtttgtatgaatgatgctaaatcattgaagaatgatttacaatcggaaagaaacacatctgactgtattgcctgaaaaagagtggatatcagcgaataccatgcaaaaagaaacaaggttgtttggaacattaccgtttttgctttatactgtccggcaagtcgctctttttgtgtttcgtatttcgtttttgcattctgataggctgcccggtcacaggcttcacatttttcatagagtaccggcttttccaccggtatctctacgattttctgatgtgtccgggcataatcccgttcctgtgttaagcagcgtattttatcttgacaatcctctatcgtgacgtttgcgcttcgcagcttttctttctcgatccgcaatgctttgtctgccatcttcaagtcgttctttaatgattgaatattcaatgctctgttctctttgtttaatttctcgttcaaggtcagagattcgttgagctgcgtcttcagttccacgataagctggtctttctgttccagttctgcctgtatctcctcggtcaagagcagaagttcttccaactgttcggcgttctttgattctctggattcgttcatctatatcacgtcctttctctatctgctgttccagttcagcaattcggtgttctgtttcagtaataaactgttttcggtgttcagcttctgtgccaatttctgccattgctgattttcgttttccaaaagttctatctttgttttctgttcttccatcttggaaagcagttcctcggtatttggcaaaatgttgagcagctcggataactcgctgtttaatttttgcaatttctgattctgttcctgcataagagagagctggatgtcccggttctgcatttccagaatcatttctgccattaggttctgctgttcttcgatttgaccaatcatggattccattaagggtataatttcccggctttcttctaatgtcatttaatcgctccttccataatgataatgcacccgatacttttccaaaggtgtccagtatcctttgcaataacgtgttttgttgttttatgatttgattttccgctactttccacgagccttttatttcctgcccggcaagaaacttttgttcaatctttcttgcgtcagctccttcatggatggtaggaatctggagttttccctgcttttcataagaacggtgatcaacctgattatgcaaaggcagatgttcgttacacacctttgcccattcactccgccacagttcacagttttttggattgttccatccagtagcatcggtcagcacccgtttccattgcaggcggtttcttgctccaatcttctgaattccgttttcgtctaatacagggatacggattccatgacggtcagggtttttcttatcctgccaccagttcggatgggattcatcaatcacgatatttccgtttttatctctgacaaaatcccaatccttgacttctttctttccccaagaatgatccgggttaaaagggcgcatagtcagaagcagatggacatgggggttgccatcccctttatcgtggatactccaatcagcacacattcccttatccacaaatgttttttggatatagtcggctgtgtattgaatctgttcctgtctgctccattcttttgggagggcaaattcaaatgacctaccaagttgggcatctgcacttttttcaatcttcaatacctcattccataacctttgtttctgaaatgtgattttgaatttttttaaggcagcttctttatcttctgaccttttgtatcggacagatttttgaaagcgttttatattttcttctggtactatctgccattcaggaggtgcgttttcgcacatcatcagtcgggtgtagaccacttcttttttagatgtgtaataactgattcgcccggtttcctcatttttcatcacatccccattgagatatgcggaagcggagataatagatttccctttacttcgtccgactattttgactgtgtaatgaaaaatcgccatgtctggattcctcctttctgcacatccggcatagatttccggcaacattgctttcagttttagaaaaagcagcattgacggaacgccctctgcgtaagagtgccctgcgcataacagcctgcatggaatgcgcccctctggcgaagagtgcctcctgcggcatgagcaggtctggctgaaagccccgccgacggaacgagcccggcaagcgtgagcgcagaccggttgccacttgtggcaaacttatttggacgacctctggttgtccataagtgcgcccttcatgaaaaagcaatgaagggaatgaaaaactcatcccctccgtcattacacttcctccatatcggtatttgtttctttctgcattgcctttgagaaaaattttccattggcttcctgctttttcagaaaaccaatcagctttgggatgtcttcctcctcaataggcgcaccaagaacggattccaccgcaccgccaacctgacagagtttactttcttcggctttctttcgtttcagaagttctttcttctgtgctgcatatcgttttgctttttcaaggctttcctgttccttcttttccatttcaagcattcgttcttcataactttttgttgattttgccattattacattcccctttcttttgcaaacataagttcttggttgcgtatcagaagaagcacatggtataatcttcttgcgtgtaggtatatcatggcttcggtctgatagaacctttggcggtttctttggaagccgcctttttaatttgccgcagttcttgttacggcttttacatttcctctatccctcaaatcacgaccttcattcgcttccataaacatttccagaatatcggttttaatcaggactttgcgaccaacctttaatactggaagtttcttccattctacaagctgtcttaaggtatttctgccgattcccgtatagtcagcagcttcttcgatggataatgcaatttttctttgcgtcatataatcacctccttataaattgcattatgcaattcttgtgatgtaagtatatccttttcatatctttttgtcaagcgttacgaaatattaaaaacaaactttgtattgcatattgcaattttggaaaaacaatgctataattcatacataccgaaaaaggaggcagtcagcatgaaagataaagaattacgcaagctgataggcagcagaataaaacagcgccgtctggaattgaatctgacacagccttatgtcgcagaaaagatgggtgttactgcttctacaatcctgcgttatgagaatggttcgattgacaatacgaaaaaaatggtgctggaaggtctttcggaagcactccatgtatctgtggaatggctcaaaggggaaacagatgaatatgaaaccgacattacggataagagagagttacagattcgtgatgcgatgggagatattctggaacagttaccgcttgcccttaccaaagaagaagatgctttttcaaaagatttattactgctgatgttaaaacaatatggtctgtttttggattccttccagttcgcctgcaaaaacttcaagggaaatgcaggtcagacggatattgccaaaacaatagggtttgaatcgaatgaggaatataatgagattatgttcttaagggaaatcactcctaccatcaatgctcttaatgagatggcggacgttgtaaggctctattccaagaaaccaaaaacagcagaacaaaggcttgcaaatcttttatcagaagtcttatacgaagattccgaatcggtatagtaagacaaccggagttatgatatacttacacgcacgaagcatttcatcagttccgattgtctaatatcgaaaggagatatacgattatggcaaaaggatctgtaagaaaaaaaggaaagaaatggtactaccgcttctatgtagaggacgcaagcggcaatcttgttcagaaagaatgcgttggaacagaaagcaaaagtgaaactgaaaagctgctccgtcaggcaatggatgattatgagaaaaagaaatttgttgccaaagcggaaaatctcacagtcggacaacttctggatgtgtgggcagaggaggaattaaaaacaggtacgctcagcaatggtactgtggagaattacctcggaacaatccgaaatattaagaaacacccattggcagaacggaaattaaaaaatgtaacctctgagcatttgcaatccttctttgatttgctttcctttgggggagttcatcccgatggaaaagagagaaagggttacagcaaagattacatccattctttttccgcagtcatgcagcagtccttccgctttgcagtatttccaaaacagtatattacgttcaatcccatgcagtatattaaactgcggtatcagacggacgaagttgatttgttttcggatgaggacatggacggaaatatccaaccaatttcacgagaagattatgaaagactgcttgcgtatcttcaaaaaaagaacccagccgcaatacttccaatccagatagcctattatgccgggcttcgtattggagaagcttgtggtttggcatggcaggacgtaaatctggaagaacaatgccttaccataagacgcagcatccgatatgatggctcaaagcgcaaatatatcatcggaccaactaagcggaaaaaagtgaggattgttgattttggagatacgctggtagagattttccgtaatgcccggaaagagcagttaaaaaatcgaatgcagtatggagaactttatcacacgaactactacaaagaggtcaaagagaaaaacagagtgtactacgagtattattgcttagacagaacagaggaagtcccggcagattataaagaaatttctttcgtctgcttaagacctgatggctgtctggaacttccgactactttgggaacggtatgcagaaaggtagcaaaaacattagagggatttgaaggctttcatttccaccagttacgtcacacctatacaagcaaccttttagcaaatggagctgccccaaaagatgtgcaggaattgttgggacactcagatgtcagtaccacaatgaacgtctatgctcactccacaagagatgcgaaacgaaaatcggttcggcttcttgataaagtggtgggcaatgactaaaaaatttcccttatttcccttgtgattatctcataagggcaaaaacaagggaaactacatatcattttactaatggacaggcgggaaagcctgtaaaatgggaaagttagagggataattatataaatatcagtttatagagtagaaatttttaatttgaaaagaaataaatgcaactccgagaatatttgaggaatagaaaggttacccaaatgagaaaaagaataagttctgtgctattgattatcgggatttgtttatctgcgactgcctgttcgtcaattagactcttttctaatattatggattatattaccgataatgataatcccttgagtgggaaaaatacagatgaaagaattattatgtctttagaagagacatatccggaacatactttttcagttattgactcatttgataatgaaaaaggagaaggattttttctgatgaaagcggaataaaattccgagtacataatcttacttacaataatacttatcattttggctgtgaagatgactatttggcaacaattttaaacagtcaaaattacattgagaaagcttccgatatagccataaagtatggatatgttttaaattatgacaacaaaaatgaaatagtatctattcaatgtgcgaaagatattcagcaaacagatgatttttcatattacgcaaaaatggtatatgacattctgaatttagcagatacaccaacgattattgatcctgatacggaattttcaacaggagaagttaattattacagccgcccttgtatgggaacagtgttgtgtgacattgtctatgacacatccaaatcaagtttaaggattagtttcgaagaaaaggatttatccgaagaacagattaaaacaaaatttgaagaaaaataccaatggctaaaagaaacacaaaaataaatagtttttagaggagcactaaagcatatgacgaaaaaacaaataattgagaaattacaaaatgcagccaaaccatatgaagaatattatatagatgaagatttaattaatgctattaatcaatatccagagccttttgaattagtagaaccgattttggcagttatatcctcgaatccacaagtcgattttggaatgccgggtgatttagttcattttgttgaacaattttataaaaaaggatatgaagaattactgatttcttcagtaagaaaaaatccaacaccgcataatatttggatggtgcatcgctgctataatgatatagaaaatccggaacgtaaaaaatttgctgaattgataaaagttttgaaaaacgacagttcaatttctttagaaattaaaaactgtattgacgaatttgactgggaatagaaagttcctatagtgattctaagggatagataagaatcagtattaatgagaaaaaacaaatgagttcaagaagttaatttagttaaatattataaatgtggtagaaatactgataaaattgctgatattattaaaactaattacttggtatttctctcaatggaagtcatatagggaataaataattagcaaagaaatctttagtgatttaagaagaattatgaaaagacatgtttctacaactattaatggatatatgatattaaaaatgcttatagtaaatagtggagggattatatggcggtaggatttaaagtaggctgttattggtttcaagttggaacaagtgattttttgcattcctttttttcaacgatatgtattcggctcgaacatggaaaatggggaagtgtttatcccaaattaatggaagaattatatcaaggatgtttaaaaaatcaggatttaaacgaaggactagaggaattgtgtaaagtaaaaaaagaactgaaaaacttttctccatcttatgtaatatgggatgctgaagacttaagtttaacaccgccttggggaaataatattagttcagatattacggatttgtctaattattttgttaccagtgatggaagagatttgatttccgttttaaacgaggcattggaagacgccaaggaaatgcattgtgacattgagattgataacttataataatttgaaaatcagaaagaagaagcaagagtagtttcgttaacatccattttaagcattaatgaaaacaatagcggatgtaactgggttatggtgaatatgcggaagcagaaaacgctacaagcgattggatgtaagatgtaaagataaatagaaattccagcttgtagaattgtgaaaaatcaagatttacttgaagaactgaccaaagcaaaatctgaaaaggagtactcatgtcaaaaaaatacacagaaagaaaagatggtattaaatctgtaacattagtaattgacgcatatgacggcagaaaactggaaattccacttgaagtgtggcaggtcgatgttatatgtgaaatgcttggcttaagtgtagatacaactaatttagatacttattgtatgcgaagcaaagaacaaacagaagagaatatgaaaatatatcatcatcttttgaaaaaatcacataacgaggaatagaaatgatttctaaataattggaacttttaggataaatgacaattcagtattttactaaaatgggagaatatagatgaattttatagataaagctttagaagagattacgaatggtgaagattttgttcaagcaatggcagagatttatgagcatacagaagtacgagaaaagttagacaaatttccagcttggattagaaatatcataaccgttattgattatgacactgaattatctatgaatggtttagattttaaatcatataggaatgttattgatgccttaactgatatgggattgattaaagaagcggacatactaactgcttatgaaagtgattattcccaagaaaatgcagatatttgttatttaaaacttgccttaaataatgactatgaatcattttggaatagagtatactcatatgctgataaaaatataaagagttactagatctaaatttagtggggaatgtaaagtgaaattatctttaaaaacaaatgcaataaaatcatttggtaaaacagttgagaatgatattaaaagtttagaaaaagtattaaacatcaaatttcctaatgattacaaagatttcttgttgaaaacaaatggtggcagtattcctaatgataataccaatgaaatagttttaaagaatatagggaaaattataaatatagatattctctatggagttaatactgacaattcatgctttgatattgaatactggacaaagaaatatattgatgatttatttgaaaaaactgttattataggagatagtttacaaaatggatttattgttatgatttgtgatggaaataatgatggtgtttattattacgatgattcatattattttgatgagtctaacgatgaaaataatgtatatatcatatcaaataattttacagaatttcttgatatgattgtgaaaagataaattttggtttgtaatactcttcatcacatagtgatgtcaaggaacaaggagaagccgatacgccgtagggcagtccttgacagaacggacggtattaaatccaaccatgctatataggggacttgaaaggtcacaaaccttgcaagtcttcttgtctgttatctggaaactttccggagataaagcacttcctttttgacttcacgaacaaattcatcacaaaaaacaggttgacaatcacttgctatataacaatttttttcagacgaataggcaaacgaagagatttccatttccagtgttttttcattgattccatagtaatatatctgagaagtggcaagtgtcatatgaatactggcaaaaattacagaacaaatgggacacaatgatagtacaaccaaaaaattatattatttcagcaataaaacaacgaaaaataaggaaaaacagattgaaaatgctatctcattttaggaatgattactgtttgactacataattgactacattggaattattcagaaatgaaaaaagccagaagccttgaatattcaaggtttctgacctcttagtcaacaggggatgagagaatcgaactcccaccaaaggttttggagacccctatcataccatttgaccaatcccctattcagttgtcgcttaactcaagcgacttgttaagtataccctatggcgtgcggaatgtcaagaaaaaaataaagaaaatttcacattgaaaaatttcgttactgttcactcccgtgtcaatcacatcgttgttctgcccggaagtgcgtgctataatgatgtcagttaaaaaataactaaagtggaaagggaatggataaagtaaatcaatgttgtatacaatacctgattattatcatgaatttcgttgtgttgcaggaaagtgcgaggacacttgttgtgcaggatggcagatcgttgcggatgaagccgcgctggaaaagtataaaaatgagacaggtgtatttgcggagcatctgaaagaatctattaactgggaggaaggaacatttaaacaggataaagacaaaaggtgtgtgtttcttaatagatcgaatctatgtgatatgtatactgcattaggagaagaaagtttgtgcagaacctgtaaattatatcccagacatatcgaagaatttgaagatgtgcgggaagtaacgctttctgtatcttgcccggaagtggcacgaatcctgatgaacaaaaaagagccgatgcattttctttcttatgaaacagacgaggaagaagaatatggtgactttgatccatttttatattcaaagcttgtggatgccagagaagtgttgattgatattttacaagacagagagaaaaagctgaatttacgggcagcacttattctggaaattgcacgtgatgtgcaggaatgtattgatgaagaagatatattttctatggatgatgtatttgattattatcggacggaagaagggattcacgaagttgaaactgattttgcagaagcagatcatctgacgtatattagaaagatgttccaaaatcagtatcagatggaacatttaagaggcgattgggagtcttatcttaaaaaagcggagaaactattatatggaaatgcaaatgataatctgtgcgaaaagcactatatggagatgctaggagagtttcatacctggcttcagaaagaaatgccggagtatgaaatacaatatgaacagctcctggtatatttcatcagtacttacttctgcggtgcagtatatgatggagaagcatttgcaaaagctcagatggctgttgtcagtacacttctgatccatgaacttctgatggcgcaatggaaaatgaatgaaaaagcattgagcataaaagatgtgatagaaattgtgtatcgttattcgagagaactggagcattcggattcgaacctgaatttgatccaggaactgatgtcggaaagagagtattaataagtgaataaaaataagaccatcggctttatgttcagccgatggtcttatttttaagaagtagaatcgtttttttataggttgaaaaaattctcttacagaattccaagatcgatcattgcttttttcagaacttctttatgtgcatcttccatctctgtcagaggagctctaagagttccgacttctttccccatcatgttaagagcagccttaaccgggattgggtttacctcgcagaagagtgcgtcaatcagcggaagtgcatctaactgcatcttgcggctacctgcgatatctcctgagaaaaatttatagcacatatcatgtacataggtcggagctacgttggaaagaacggagataacaccgattccgccaagtgcgagaagtggtacaacctgatcatcatttcctgagtaaagatctacattaccatcacaaagatgcataatctgtgcgactgtgctgatatttccagaagcttctttaataccaacgatattctcaacatctttcacaagtgttgcaactgtctgtggctgaagtccacatcctgtacggcttggtacattgtacagaatagccggaatatttacttcattacaaatagctgtgtaatgagcgatcagtccgttctgtgttgctttattataatatggtgttacgagcagaagtccgtcggctccatcttcctgcgcttctttggacagctgaattgctgttcttgtacaattagaaccagttccggcgataaccgggatacggtggttcacacgctcaattgcaaaacggattgttgcagcgtgttcttcttctgtcatagtagcagattcacctgttgttccacagatgatgatcgcatctgtaccgcctgcgatctgctcctctaacatctcatctaatttgtcataattgacctcaagattctctttcatcggagtagcaatcgctacacctgcgcctttaaaaattgccattctttttatcctccttaaacatggtgaaacaaagtattactggtcatagcaggttattggttactgttcataagttccctgcgaacgataatcataatagccatgaacggtaactgtttaatatacatctatgcaagaaagcgtaaactgtaaataaacataaaagaaacggcaagatgcgccgtccccaaattacatcatgtatctaacgttactatacgtttccgtgtttaagcaaataataacaccgagggtacaatgatgtcaacatagtttcgggatttctttcttatttataataccctgtttataagcacatcttataagaattgattataataaagtataaccgattttttgacttttttcttatacatatgatatcattaatctgctagatgtgtgaatgacaaagctgtttcatttgcactttttttatgcttgcatgtttgtcttttgaaaaacaatcgcaagaaacgacataagataacaagagagaattgcgaggatgagaaccgcgatcctcggaaaaggtatgtggataggaaggagacctactgtgttaacaatcggtaattacgtgaaagttaagacactggaggaagcttacgagctgaatcaggcaagaaacagtcgtatcatgggcggcatgatgtggatgagattaggaaatgcgagagtgaagacgatcattgatatgtcggatcttggtttgaatgagattgaggagacagaccatgtcttccgcattggagcaatgtgtacactgagccagctggaagagcatgaggggctgagaaaattctatggggacggaattgcagaaagccttcgtcatattgttggagttcagtttagaaatcaggcaacagttggaggcagtatctatggaagatacggattttctgatgtgctgactgcattactggcattggatacatttgtggaattatataatggcggaactgttcgactttctgagtttgtaaacagaaaagcagataaggatattcttgtatctgtaattgtcagaaagagtaagagaaaattccgttacgaatcaattcgtcagacaaagacagatttcccggtgctgacatgttctgtcgtaacaggaatttacagaggtcaggagtcctggttcttttcagtaggagcaagaccgatgaaagcggcattgcttgaaaagcagtgggagatcccaaaagatgctacagacgagcagcttacagagtatgcaaaacgtgtggcagcagaatttacttatggaagcaatatgcgcggaagtgcggagtatagaaagcaccttgcagaggttctgcttcgcagagagatgcgctcaattttagatgaatataatgcggaggagaaataggatggaagtacagtttactctgaatggaaagaaagtaagcacagagatcgcagcagatacagtccttttgaaccttctgcgtgatcttggatgtaagagtgtaaaatgtggatgcgagacaacaaactgtggtttgtgtacagtatggatcgacggaaaatcccgtttgtcatgttctgttcttgcagcaagcattgacggacatgaagtgacaacacttgagggtgtagagaaagaagctgcggaattcggctcatttcttgcacaggaaggtgcagaacagtgcggattctgttcaccgggattcattatgaacgtacttgcaatgttccgtgaattgaagaacccttcgatagaagagattaaagaatatcttgcaggtaatctgtgccgttgtacaggatacatgggacagcttcgtgcaatccagaaatatatggaagtaagaaatacagcagttaatattacagtaaagaaaatgggcggggaggagtaagaatggaaagaatagataaagttcagaatctgattcctgagaaaccggaatttgtccacagcaatcaggaaaaaggagaagatgtagaatccctgaagattgtaaaccgtcctgttgttaagaaagatgcggctgcacttgtaacaggaaaagctgtttatacgaatgaccttgcaccgtcagactgtctgatcgttaaagttgtaagaagtccatatgcacatgcattaatcaaggatattaatacagctcgtgccgaggcagtacctggaatcgaatgtgttcttacatataaagattgcccgaataagagatttacaatggctggtcagacatatccggaaccaagtccgtatgatcgtctgatccttgaccagagaatgcgttttgttggagatgcagctgctatcgtagctggaacatctgaagaagctgttaagaaagcaatgaagcttgttaagattcagtatgaggttcttgaaccggtacttgatttccgtacagcgaaggacaatccgatccttgttcatccggaagacaactggagaagtctctgtccggttggagcagacaacaagagaaatctctgtgcacatgatgtgagtgaggatggagacgtagaggcagttcttgcaaaatgcgatcacgtgatcgatcgtgtttaccatacaaaggcaaaccaacaggcgatgatggaaacattccgtacttatacatatttagatgcatatggaagactgaatgttgttgcatctacacaggttccattccatgcaagaagaatccttgcgcatgcgcttgatatcccgaagagcaaagtacgcgtgatcaagccaagaatcggcggaggatttggtgcgaagcagacagtagttgcagaagtttatccggcacttgttacctggaagacaggaaaaccggcgaagatcatttatacacgagaagagtctttgatcgcttcttcaccgcgtcatgagatggaacttcatgtacgtctgggagcagataaagaaggaaatatcaaagcaattgatctctatacactttccaacactggagcatttggtgagcacggaccgacaacagtaggtctttccggtcacaaatctattccgctttatggaaaggcagaagcattccgcttcacatatgatgtagtttatacaaatgtaatgtcagcaggagcttatcgtggatacggagcaacacagggacagttcgctgtagaatcagctgtaaatgaacttgcagaagttcttggaatggatccgacagtgcttcgtgagaagaacatggtacgtcagggcgataagatgccggcttattatggcgaagttacaaacagctgtacactcgacagatgtcttgcaagagcaaaagaaatgatcaactgggatgagaagtatccataccgtgatatgggaaatggaaaagtccgtagtgtcggagttgcaatgtccatgcagggatcaggaatctcagcagtagatacaggtgcggttgagattaaagtaaatgatgatggattctacagtctgatcatcggagctactgatatgggaacaggatgcgatacaatccttgcccagatggcagcagagtgtcttgaatgtaaaccagaagaggttgttgtattcggagtagatacagacatctctccatatgactgtggttcttatgcatccagtacaacttatgtaacaggacaggctgttgttaagacttgtgagtcccttcgtaagaaaatctgtgaacgcggagcagagtatctcggatgtaagccggaagatgtagatttcgacggagaatatgtaacagagctggcaacaggaaagcagatctcaagaagccagatcggaaataacgtaatgtgcttcagcaacgcaccactctccgcaagtgaagcattttcctcaccggtatctccaccgccattcatggttggtatggcagaagtcgagattgacaaagagacaggtgtactcgaactgatcgattacgtagcagtcgtagactgtggaacagttattaacccaagtcttgcgcgtgtacaggtagaaggtggaatcgcacagggaatcggtatggcactgtatgaagatatcgtatatagcgagaagggaaagaacttcagcaattccctgatgcagtataagatcccgacgcgtctcgatgtcggaacaatccgtgttgagtttgagagcagctacgaaccgacaggaccgttcggagcgaagtctatcggagaaatcgtaatcaatacaccatcaccggcaatcagcaatgcgatccaaaatgcaacaggagtgatcattagagaactgccgatgacagcggagaagatttacagaggaatttgtgagcgttagacttcggattctgtttgaaagtataaaaaatgagagctggaatagttactatatgtgggagctgttctggctctcatttttcatgttgacattgccagaagatttagaaaaataccttccaaaattataagattaattttgtggatgcagagcgactcacaaatgttgaagaattttcagaggatttacaggtgatactggctatgctaagatatagaaatagtagagaagaattgacggattacattaatcagaataaagaattctttcaacatgttgattatgaaacgagtcaggcaatgaaagcttttctaaatatgaaagacgtaccaggtaaagtagggcagaaggaggctgttaacagttaaatataaatcataaaatcatataagtcggtggtgagttttataagatattagagtggaatattattgaaaggagttgatactttgagtaaatattattctatacatgaattctcaaaaattataggcgtatctgctcagacattacgaaattgggatgccaatggaaaacttcatccgcatcatactacagtaagtggctatagatattattccgatgagtaactcagccaagtaataaatgtaaagcctaaaaatcgcattacaattttatcagagaattgatacaggaggaaacagatggtaaaagccataaaagtaatgttgataccaaacaatgtacagaaaactaagatgtttcagtacgcaggaacttcaagatttgcttataactgggctttggccagggaaaaagaaagctacgaaaaagatggcaaattcatttcagattcagaactcagaaaagaatttacaaagcttagacattctgatgaatacgcatggttattaaatatttcaaataatgtaaccaaacaggcaatcaaagatgcctgtactgcgtataagaactttttcaagggtttgcaaaaattcccaagattcaagtccagaaagagatcaatgccgaagttctatcaggacaacgttaagatacaattcagtaatacccacgttaagcttgaaggtttttcttccagcaggaaagcaaataagcaaaaaaagaattgggtaagacttgcagaacatggacgtattccaacagatgttaaatatatgaatccgagaatatcctttgatggattgaactggtggatcagtgtatgtgtagaatttcctgactgcaaggaaacacttaatgatgatggagttggcatagacttaggaattaaagagttagccgtctgctctgatgccgttaagtataagaacatcaataagagtcagaaagtaaagaaactagaaaaacagaaacgtagattacaacgtagtatctctcgttcttacgagaaaaataagaaaggggaaagttactgtaaaacaaataatcctatattattcacggctatgccgtgtgaagtggctgaaagccacatgattactgtattttaattgaatattgctgtttcacctatcaagtgaataaaaaaagagcatccatttgtggtaaaattaaggtgtcgaatcttaaataataacccaaaggagccctttatgagtattgtaaacaccttatcactagaaagcaatagacagattaaaataaattttgatggaggagatttatcctccgatgcaggcttacttcttatcaaagaattcgtaagcaaacttggccttgataaacttttcagtcactcatttaagaccaatgattctgcatcatttagatatcacactgacaaggagaatctccttcagatgatatatatgatcattgcaggttactttgaagatgatgcttcagatgaacttacaaatgatccagtatttaaagcagtgctaaataaagatgctttagcttcacaacctacggtatcaagattctttaatcgtatggatgaagatactttaaaccaattccttacaattggcagaatacttcgaaaaagagtttacagtgttcagatgccacaggctgtcattttggatttggattccactcttcttgatgcatacggtaaacaggaagcgcagagcctttaacgttcattatcaaagcaatggataccatccgcttgtctgttatgatggattgaccggggatttgataaaaatccaacttcgtgatggaacacagtattcctgcactggagtggttgatttcttgcaaccaatacttgatgaatatctgaatgattatccgtcaatccgaattctgcttcgtggtgatagcggttttgctacacctggcctttacaagcagtgcgaggaaaatggcacaaactatgtaatccggctggaaggagaatggtattctccgtggaaaagcatcccatcttgtggatgagcttgatgaaatcactagaaataacaaagtcgattatgcagtagtttatggtgaattcatgtacaaagctggtccatggccttatggaagacgtgtagtatgcaaggttgaaaagccggaaaaccagatggtttacatgtacacattcattgtcacaaacatggattcatcaccagagtatcttatcaaattttactgtaagcgaggactgatggaaaactttatcaaagagagtaaatctggttttgattttgcttccgtaagcagtcatacccgaattgtaaatgccaacagacttcaagtacacgctcttgcgtataacatatttaattggtttagacgattggcgttatcagcaaatatgcgaaagcaacgtattgataccgtccgtttaaaactgctgaagattgctgtaaaagtagttcgttcagcaagatatatcacattcaagctttgcagtagttgcccttataagagtgaattctataagacaatttttaatatcggcaagctaaatgtacagctggaatagcacctattaacgaaccttgacagtttaacaattgctctgaactctgcgatagagactttgcgcccttttgacaggaaaattgagcgatgttatgactgcatggagcatttttaatttcatggtacagttatcagttcagatattgttccatgaataattcaggataatgtaatcaaaaaggaaaaacttttattaaaacgaaatcacagattaacaaacatccgtaaaaactatttgaatcagaccatatctgagatcgtaaatcgaaagccaagatttatttgtattgaagatctgaatgtcagcggaatgatgaaaaatagacatttatccaaagcagtacaggaacaaggatttttttggtttagaaaacagcttgaatacaaatgcaatgataaagggatccagcttattgtggctgatcggttttatccatcatcaaagctttgcagctgctgtggaaacatcaaaaaagatttgaagttatctgacagggtttatagatgtgaatgtgggaatatgattgacagagattttcaggcatctataaatctcaaggcttatggagaacgatttgcaagctaacactgaaacgttaatgcaaatatgtacggatacgttagtccggaatttacgcttatggagagtacaagaacttgtgagtagatagatatttatatcatcaaaagcatactcgttgaagtaggaatgaaacatggaagtttataactttttataagttttcagtaacggatgaagtagatatgtgtaaagcaattcaggaaatgtatgatgatggagttcgacaaggacgagatgaattgttaaaggaattaattcaaagaaagttacagaagaaaaaaacttctgagcagattgcggaagagttagaggaaagtgtggaggttattgaaaaaatcataaaagcaatgtaatagtgcattgtttgaaagcaaagataaaacaaataccacgcaaaacagagcagaaggaagatttatttatgataaatataattcgcgtcggaagagaacacttgaaagaagcgtatgaaattgtaaataaggtagaccaggggatgaatgttccggaatggtttgtcgcagaaccgtatgaggaatttgatttctggatgagagaagaacgaggacttttgtatcttgctgttgatgaagatgaaaatgtaggagccatgttcttcgtaattttgccgggactgcatcctgataatcttggatatgatcttaatatggaagaagagcagctgaaactttgtgcaatgatggatacagcggcggtactgccggagtttcgcgggcatcatttacaatatgaaatgatgcagcatgcggaagaagatttaagacagatgggatatcagtatctgctctgtaccgtacatccggaaaatgtttttagcagaacgaatgtcatgaaacaaggatataagaagatgcttacgaaggagaaatatggtggattcttaagagatatctggatgaaagatattatatgattgcgagaattgcatagcaatggacaagctgggttacatcagtgagtggcaaaatttatttttgacactcacatcattatataatatagaaaaaagaaaaggtatgtggtatactctcgacatagttaagaaatgacataacagaaacagatagaaacagatttctagaaacaaactgacagagacatgcggatgaaaggagtaacagaaatggagacatacatgcaaatgcttggaagacttgcaaagaatgcatcccgcggagcggcaaagcttggaacaaaagcaaagaacagaggacttctcgtagtggcaaatgaacttgtggaagagagagaattgattttacaggagaatgcaaaggatatcgaagctgcgaaagataagggcgtgaaacagtcattgatcgacagattggcactgacggaacagcgaattgaagatatggcagaaggtctgcgtgaaattgctgcactggatgatccaatcggagaagtacttggcatgaagacaagaccgaacggacttcgtatcggaaagaaacgcgtaccgcttggcgttgtcggaatcatctacgaatccagaccgaatgtgacagcagatgcatttggcctttgcttcaagacaggaaatgcggtaattctccgtggcggaagtgatgcaatccattctaacaaggcaatcacgcgtgcaatcaagacaggtcttcgcaaagcaaagttatcccaggatctcattcttctcgtagaagatacaagcagagaagttgtaaatgagatgatgaagatgcatggttggatcgatgttctggttccgagaggtggagcagcacttattgcaaatgtagttgcgaacagcactgttccggtaattgagacagggaccggaaattgtcatgtatatgttgatgagacagcagacattaagatagcaacagatattattgaaaatgcgaagacacagcgccttggtgtgtgtaatgcatgtgaatcacttgtgattcattccaagattgcagaggtagctttgcctaagatcgtaacaaaactgaaagaacatggagtagagattcgtggagatgagagagcgcaggcaatcagttctgagatcatcccggcaacagaagaagactggggaacagagtacctggatgcaatcatttccgtgaagattgttgattccattgatgaggcaatcacacatatcaatacatataatacaggacattcagaatccattattacaaaagattatgataatgcattgagattccaggatgagatcgatgcggcagcagtttatgtaaatgcatcaacaagatttacagatggattcgaattcggattcggtgctgagatcggaatcagcacacagaagcttcatgcaagaggcccgatgggactcgaagcattgacaacaacaaagtatattatcttcggaaacggacagatcaggggatagtatagatagcaggttttaaaatccaggtcaattagtgtaagttaaataaacttgtctttgacctggattttatgtatcataattcaagtcaacttatgatttggctataagcttgcctggaattcacaaaattacaatccaagtcaacaacatttctataaaatcacattccctcccccaaaaagcatcctattaataaaataagaagaaaataaaaaacttataaaaataacaatcagtgttgacaaacagaaatcgaggtgctatcttagtatctgtaaggtgttagcactcaaaaacaaagagtgctaataacaaacaaagatgagaagaaaggggaacacagagatgtctgtagaagctgaattaagtgaaagaaaacttacgatattgaaagccatcatacagaattatctggagactggcgaaccggtcggatcacgaaccctttcaaaatacacagatttgaaattaagttccgcaacgataaggaatgagatggcagatctggaagaccttggttacatcttccagccgcatacatcagcaggaagaattccatcagataagggatatcgcttttatgtagatcttctgatggagaacaaggagcaggagatcagcagacgagaggatgcacttctcgagaagacagataaggtcgagaaagtactccaacaggcagcaaaggttcttgcttctaacaccaattatgcgacgatggtttccgcaccggtcaacagcaggaacacattgaagtttattcagctgtcacaggtggatgaagaacagattgtagcagttatcgtacttggtggtaatgtgatcaagaataagatcatcgaagttggagaaaccttaagtaatgagaatctgttgaagctgaacatgcttctgaatacgacactgaatggattatctattgatcagatcacattaggtctgatcgcaagattaaaagaacaggccggtatccacagtgaggttgttggtcatgtgcttgacgcagtggcagagattattcatgtcgataatgatatggagatctacacaagcggcgcaacgaatatttttaaatatccggagcttagtgataagcagagtgcacaggagatcatcagtgcattcgaagagaaacagcagttagctgatctggtgacagagacgttggcaagtgaggagaacaacggcatacaggtttacatcggagatgaaactccggttaagactatgaaagactgcagtgttgttaccgccacttatgaactgggagaaggcatgaaaggaacgattggaatcatcggtccgaagagaatggattatgaacatgtcatgaagacgctgaagactttacaatgtgagttggatgcgatttataataaagaaccaaaagaataggaaggtagaaagctggtgacagagaacatgagcaaagaagatatggtaaaagaagctgttgaagaggcgaaagcaaaggctgcgaaagagcaggcagaagctgaagagacagtagaaacagaagatgcccaggaagttgagactgaagcgaaagaagcgacagaggaagcaactgagactgaaggagattcagaagcagcatcagaaggtaagaaaaagttcttcggaaagaaagagaagaaggacaagaaagacgagaagatcgaggaactcacagaccgcgttactcgtcagatggcagagtttgataacttccgcaagagatctgagaaggagaaatcccagatgtacgagatcggagcgaaagatatcatagaaaagattcttccggttgtggataacttcgagcgtggacttggttccgtaccggaggaggagaagaatgctccgttcgtagaaggaatggagaagatctacaaacagcttatgactacactggaatccgttggagtaaaaccaattgaggcagttggtcaggaattcaatccggatttccacaacgcagtaatgcatgtggaagatgatgagctcggtgagaacatcatcgcagaagaattccagaaaggttacatgtaccgtgaaagtgttgtgagacacagcatggtaaaagtagcaaactaatttgatttttaacaagattcagagattagatagaggaggaaatttatcatgggaaaaattattggtattgaccttggtacaacaaacagctgtgttgccgttatggaaggtggacagccaacagttatcgcgaatacagaaggcgcaagaacaacaccgtctgttgtagcatttacaaagacaggagagcgtctcgtaggtgagcctgcaaaacgtcaggctgtaacaaacgcagcaagaacaatctcatcaatcaaaagagagatgggaacagattataaagtagatattgacgataagaaatattctccacaggagatttctgcaatgatccttcagaaactgaaagcagatgcagaaggataccttggtgagaaagtaacagaagctgttatcacagttccggcttacttcaacgatgctcagcgtcaggctacaaaagatgcaggtaagatcgcaggacttgatgtaaaacgtatcatcaacgagcctacagcagctgcacttgcttatggtcttgacaacgagaaagagcagaagatcatggtttacgacctgggtggtggtacattcgacgtatccgttatcgagatcggtgatggagttatcgaggtactttcaacagctggtaacaacagacttggtggagatgactttgaccagaagatcacagattacatgcttgcagacttcaaggcaaaagagggcgtagatctttctacagataagatggctcttcagagattaagagaagcagcagagaaagctaagaaagagctttcaagcgcaacaacaacaaatatcaaccttccgttcatcacagcaacagctgaaggaccgaagcatttcgatatgaaccttacaagagctaaattcgatgagctgacaagagatctcgtagaaaagactcaggaaccggtaagacgtgcactttccgatgcaggaatcacagcttccgagcttggacaggtacttctcgttggtggatcaacacgtatcccggctgttcaggaagaagttaagagactgacaggcaaagagcctagcaaatctcttaacccagatgagtgtgtagcacttggtgcttccgtacagggtggtaaacttgcaggagatgcaggcgcaggagatatccttcttcttgatgtaactccactgtcactgtctatcgagacaatgggtggtgtagctacaagactgatcgagagaaatacaacaatcccgacaaagaagagccagatcttttcaacagcagcagataaccagacagctgtagacatcaacgttgtacagggtgagagacagttcgcaagagacaacaagtccctcggacagtttagacttgatggaatcccgccggctccacgtggaatcccgcagatcgaagttacattcgatatcgatgcaaatggtatcgtaaatgtatctgctaaggatcttggaacaggtaaagagcagcatattacaatcacagcaggttctaatatgtctgatgacgatatcgataaagctgtaaaagaagcagctgaattcgaggctcaggataagaaacgtaaagaagcaatcgatacaagaaacgaagcagacgctatggtattccagacagagaaggcaatcaaagaggttggcgacaaagtcgatgctacagagaaggcagctgtagaggctgacgttcaggcactgaaagatatccttgcaaaatctgctccggagaacacaacagaagagcaggtagcagagatcaaagctgcgaaagaaaaactgatggagagcgcacagaaactgttcacaaagatgtatgagcaggcaggtgctgcagcaggtgcacaggctggtcctacaccagaagctggtccggctccggatggtttccagggtgatgatgttgtagacggagactacaaagaagtctaaaatatagaaaagatgccggtaagacagaagagaaacaggcagcagggcatcagataaatgaagcatgaagagaaattctacggagctttgtagcttcgtagaatttcttgaggttaagaaagagatacagaaaggttagtatttgtgttatggcagaggcaaagagagattattatgaggtgctcggcgtaagcaaagatgcagatgatgctacaatcaagaaagcataccgccagcttgcgaagaagtaccatccagatatgaatccaggggataaagaagcagaaataaagttcaaagaggcttccgaagcctatgccgttctgagtgacgctgacaaacgtcgtcagtacgatcagttcggccacgctgcatttgatggcggtgccggcggcggagcaggtggattcggcggcggatttaacttcaatggagcagatttcagcgacattttcggagatatcttcggagatatgttcggtggttccagaagaggtggcgcaagcaacggtcctatgaaaggggctaatatcagaaagagcattcgcatcacattcgaggaagctgtcttcggatgcgagaaagaactggatcttgtgctgaaagatccttgcgaagactgtcacggcacaggtgcaaagcctggaacatcaccggagacatgtccaaagtgcggcggtaaaggtcaggtcgtatatacatcccagtccttctttggaaccgtacagaatgtacagacgtgtcctaactgtggtggttccggtaagatcgtgaaagagaaatgtccgaaatgtgcaggtacaggatatacatccagcagaaagaagatcaaagttacgattccggcaggtatcgataacggacagagcgtacgcatccgtgaaaaaggagaaccgggagttaatggcggaccgagaggagatctcctcgttgaggttaacgtatccagacacccaatcttccagagacaggatatgcatatcttctcaaccgttgcgatttctttcgcagtggctacactcggtggtgatgtgaagattccaaccgtagacggagacgttctctacacagtaaaaccgggaacaaagacagatacaaaagtacgtctgaaaggaaagggagttccatctcttagaaatgctcaggtaagaggagatcattatgtaacattagtgatccaaacaccggaaagattaagtgcagaggcgaaagaggctctgagaaaattcgatgagcttagtggaaattcacttcatcagcatgatgatcttgcgtccaatgctgcgaaatcagagaaaaaaggcaagaaaaaaggattcatggataagatgaaagaagcctttgaagataaagaataaaaagaatgatgagagcggtagctgctgactgagaggttggtggctgccgctttttagcatatctagcgacgtaagtcgctaatacgctgaagaatatgatatgggaataattgaaaagcagattcagggaatcaaggaaaactcatatcccaaaaaaatccccccctagaacagctccttgtatttacacgcgaaatcggatatattagaagatattggaaatgcgttgcacgaagtatccgcaggcatcgtagttgtgggttttgtctccaacatctttacaaatatagcagaaagaaggtgaatttcatcgtgaatcagatcgttttgacaggaatggtgctttctgtcgcaccggtgggcgagtacgaccgcagagttgtcatacttacaaaagaacaggggaagatctcagcctttgcaaagggatcaagaagaccgaacagtccattggtgggagcggtgaatccatttactttcggtgaattcacgatgtatgaaggtcgttcttcctacacaattcagtctgtaaatgtatccaattatttttcggaattgagagcagatgtggtaggcgcatattatggcttttatttccttgaggtcgcgaattactatgcgagggaacggaatgatgagcgggaacttttaaaattactttatcagacgatgcgtgcgctgacaaatccacatcttccgaatcagttgatccgttacattttcgagttgaaagtgctgacaatcaacggacagggaccgcaggtgttccagtgtgtacagtgtggcgaccggacgaggccggcagtgttcagcgcggcgaagggcggacttgtgtgtaatgaatgtgacggagaagtgagagacggaatgtttcttgacggttctacgctgtatacgatgcagtatattgaatccagtacaattgagaaattatatacatttaacgtgaagccggaagtgctggagaagtttggacgcgtgatgggacggttgatgaagatgtatgtagataaggagttcaagtctctggagatactgcagacattgctgtgatatttggggtattatttaaaaattctcaacaacatttaagacattatgcaattgttgaatcatgaaaaaaatcatgctatactacggttatatcacctgttacatgacagtgtgaaacgagtgtattttgttgtaaatgtaatagtagcagaggaaagaaaagagaaaaatgatggacgagaacatttttatgaaggagaagaaaccgatttctttcgaagactaccttgaatatgatgagaacagcagggggaatcttggaggagaactccctgtgattgtatatcggttattggaatattctataaaggatgagcttgcggtacgttacggaagagaggagcaggttgagattttccggaatgcgggaaggaaagcgggagaattttttgcacgtaagatgctgaatctgaatcagccgctggatcagtttgtgggcgaactccagaagaagatggcagaaatgaagattggagtactccgtattgaatcagtagacgaggagaccgggaagatcattctgaccgtctcggaagatgcggactgttcgggacttccggtgcttggtgagactgtctgcaattatgatgaaggatttatttccggaattttatctttatactctggaaagaaatatgtagcagtggaaacggactgctgggctacaggaggccgtgtctgccgttttcaggcagatgtaagagaaggtgacatttagagttatggaagagaaaaactgtgagatattatttgaatatctgcgggatattatatatgattctgagaatgcgaagctggatcttgaatgcctggatgaatcttttcataagcttggaatgggactgcaatatctcgacaaggcggtgaaagagatgaagcattattcagcggagatttcaaagggaaatctgtcaattgaagcaccgggacgagataatttcctctgtgagaatctgaagaatatccatgcgaatctgaaccatctcacctggcaggcaaagcaggtggcgaaaggagattattctcagagcgtttcttatctgggagaattctcagaagcatttaatataatgacaaagcagttgaaagaacgagaagaggaacttgaagaagaggcttacagagacaaacttacagggattggaaatcgtcatctgttccatgaacgagcggagacgatgcttgctacaggtgagaagattgtcttttgttattgtgatcttgatcatttgaaatatgtgaatgatcatttcgggcatcaggaaggggatcgctacctgctgaatttcgttgagacggtgaaggcaaatatccggccgggagatctgttcgtgcgtcttggcggtgatgagttctgtgttgtgcttttgaactgttctcaagagaccatgcaggaaaagtttagaaatatacatgaagcgtttcgtcgggaaggtgcttgtgattatccgaagagcttcagttatggtattatagaactccctgaaagacatgatattgtttctacagatgagattctgcaaagagcagatgaagttatgtatgaatataagcggaaacataaagagaagtacctaaaacagcttgaaaaataaggcattagtcgttataataggaaacattgatgtacaaaggggaatatctttaaaggaagatgtgaataacttctgtaaaaagattaaccggagtgcataagttatgtaaataatgtaaatgataaagaagaatgtgaggaacatacaatggttgaaaagacaatggacaagatcgtagcacttgcaaagtcaagaggattcgtatatccgggttctgagatctacggcggacttgccaacacatgggattatggtaatcttggtgttgaacttaagaataatgtgaagagagcatggtggaagaagttcattcaggagaatccatacaatgttggagttgactgtgcaatccttatgaacccacagacatgggttgcttccggacatcttggaggattcagtgatccgctgatggactgtaagcagtgtcatgagcgtttccgtgcagataagattattgaagattatgcagcagagaatggaatcgagcttgagagctctgtagacggatggtcacaggagcagatggcagcatttatcgaggataataacattccatgtccgacttgcggaaagcatgattttacagatatccgtcagttcaacctgatgttcaagacattccagggtgttacagaggatgcgaagaacacagtataccttcgtcctgagacagcacagggtatctttgtaaacttcaagaatgtacagcgtacatccagaaagaaacttccattcggtatcggacagattggtaaatctttccgtaacgagatcacaccgggtaactttacattccgtacaagagagttcgagcagatggagcttgagttcttctgcaaaccggacacagaccttgagtggtttgattactggaagagcttctgcctgaactggctgtcatctcttggactgaaagatgaggaagtacgttaccgtgaccatgatcaggaagagctttccttctacagtaaggctactacagacgttgagttccttttcccattcggatggggtgagctgtggggaatcgctgaccgtacagattatgacctgactcagcatcagaatgtatccggacaggatatgacatactttgatgatgagacaaaggagaaatacattccatacgttatcgagccatcacttggtgctgaccgtgttgtacttgcattcctttgcagtgcatatgatgaggagaatatcggaacagaagagaaaccggatatgagaactgtacttcatttccatccggcactggctccggttaagatcggtgtgctcccactttccaagaaactgaacaaaggcgcagagaaagtatttgcagagttatccaagtactacaactgtgagttcgatgatcgtggaaatatcggaaaacgttaccgtcgtcaggacgagatcggtactccgttctgcgtaacatacgacttcgattccgaggaagacggagctgttacagtacgtgaccgtgacacaatggaacaggaaagagttaagattgaagatctgaaagcatacttcgagaagaaattcgagtggtaagataaatgagaagagcccggactgtagttcacaggtaagcttgtggatttagtttgggctgtttctttatagagtttttgaaatagcatagaagatagattgttactgttcacttccgtatcaatcactccgctgattgacacggaagatgcgtgttttgacttgaatgcatctcgccccatcgccaaaggcgatttaaaatggcgagatgcgttgctggtcgcacatcgtgtgaacagtaacgatagaacaggaggagaacgacatggacagaaaaaatgcatggacaacttacagtaaggaagagctggacagattagaacaggtgaatacagaatacaagaactgccttgatgccggcaagacagagcgcgagtgtgttgcactggcagttgaaaaggcaaaagcagagggatataaggatatcagagatatcattaaaaatggagaaaaagtgaaagccggagataaactgtatgcagtatgtatgaacaaaacaattgcgctgtttcatatgggtacaaaaccgttgacagaaggtatgaatattcttggagctcatattgattctccgcgcattgatgtaaaacagaatccattgtatgagaatgaagagtttgcttatcttgatacacattattatggtggaatcaagaaatatcagtgggtgacacttccacttgcacttcatggagtgatcgcaaagaaaaatggaacaactgttcaggtgagcatcggtgagaaagaagatgatccggtctttgttatcacagatctgctgatccatctcgcatcgaaacagatggagaaaaaggctgcaacggttgtggaaggggaaaaacttgaccttctgatcggaagccgtccgattgagcaggatgaaacattagaagaaaaggaaaaagaggctgtaaaagcaaatgtaatcaatcttctgaaacaatattatgacatggaggaagaggatttcctctcagcagagcttgaaattgttccggcaggaaaggctcgcgactgtggattggatcgcagtatggtgcttgcttacggacaagatgaccgtgtgtgtgcattcatatccctttttgcaatgctcgatgtgaaagaagtagagcatacagcatgctgcattctcgtagataaagaagaaatcggaagtgtcggtgcaacaggaatgcattcccgcttctttgaaaatacagttgcagaacttctagctttgacagaaggggagtctgacctgaaagtcagaagagcactgatgaactccagaatgctttcttctgatgtgagtgcagcttacgatccgatgtatgctgaagtgtttgaaaaacgcagttctgcattctttggaaaaggactcgtatttaataaatttacgggtgcccgtggaaagagcggttccaatgacgcgaacgcagaatatcttgcgaagatcagaaatgcaatggatgcacagagcgttgcataccagtttgctgaacttggaaaggttgatgccggcggtggtggaacaattgcttatattatggcaaattatggcatggaagtcatcgacagcggtgtcgcagtgttgagtatgcatgcaccgtgggaagtgacaagcaaggcagatgtatatgaagcttataagggatataaggcatttattgaagaaatgagataagggcagaaaattgtatattaatcacaaaaaaatagttgtttccaagttcttataaagcatggataactatttttttgtgcatgttgtatattgcatgaagattaatgcaaatatgcaaaatgacagcctgatggatgatgtgtttacaatttgtgaaagataggttaaccaatatgaaaagtatacaaaaagcatttgtaaaaattgtatataattacggacaaaagacttgactcataagtataaaaccattaaaatattatatgcgaaataaaattattttatttgtaaaaattattttaggaggtcattgatcatggcaaaatgggtttatatgttcactgaaggtaacgcagatatgagaaaccttctcggtggaaaaggcgcaaacctggcagagatgacaaatctgggtcttcctgtaccacagggattcacagtaacaacagaggcttgtacacagtactatgaggatggcagacagatcaacgatgagattatggctcagatcatggaagctatcgataagatggaaggaattacaggtaagaaattcggagataaagagaacccgcttctcgtttccgtacgttcaggagctagagcttctatgcctggtatgatggatacaattcttaaccttggacttaacgaagaggttgttgagacactggcaaaagcttcaggcaacccacgttgggcttgggactgctacagaagattcatccagatgttctctgatgtagttatggaagttggtaagaaatacttcgaagaactgatcgacaagatgaaagaagagaagggtgttaaacttgacgtagagcttgacgctgatgatcttaagaaacttgcagagcagttcaaagctgagtacaaagagaagatcggtgaggacttccctacagatcctaaggttcagcttatggaagctgttaaggctgtattccgttcatgggataacccgagagctaacgtataccgccgtgacaatgacatcccttattcatggggaacagctgttaacgttcagatgatggcatttggtaacatgggagatgactgtggtacaggtgttgcatttacacgtgacccagctacaggagagaacggtctgttcggagagttcctgacaaacgctcagggcgaggacgttgttgctggtgttcgtacaccaatgcacatttccgagatggagcagaagttcccagaagcatttacacagttcaaagaagtttgcaacactctggagacacactacagagatatgcaggacatggagttcactgtagagcacggtaaactgtacatgcttcagacacgtaatggtaagagaacagctcaggctgctcttaagatcgcttgtgatcttgtagatgaaggaatgagaacagaggaagaggctgttgcaatgatcgaccctcgtaaccttgatactctgcttcacccacagttcgacgctgcagcactgaaagctgctacaccaatggcaaaagcacttggagcatctccaggagctgcttgtggtaaagtcgtattcacagctgatgacgctgtagagtgggctgcaagaggagagaaagttatccttgttcgtcttgagacatcaccagaagatatcacaggtatgaagtctgctcagggtatcctgacagttcgtggtggtatgacatctcacgcagctgtagttgctcgtggaatgggaacatgctgcgtatctggttgtggtgacatcacaatggacgaagcgaataagaaattcacacttggtggaaaagaattccacgagggagatgcaatctcacttgatggatccacaggtgctatctatgacggaatcatcccgactgtagacgctacaatcgctggtgagttcggaagaatcatgggatgggctgacaagtacagaactatgaaggttcgtacaaacgctgatacaccggctgacgctaagaaagctcgtgagcttggtgcagaaggtatcggactttgccgtacagagcatatgttcttcgaaggcaacagaatcgacgcattccgtgagatgatctgtgcagagacagtagaagaaagagaagcagcacttgctaagattcttccagagcagcagggagacttcgagaaactttacgaagctcttgaaggtaacccggttacaattcgtttccttgacccaccgcttcatgagttcgttcctacagaggaagaggacatcaagaaactggctgatgctcagggcaaaacagttgaccagatcaaagctattatcgacagcctgcacgagttcaacccaatgatgggacaccgtggatgccgtcttgcagttacatacccagagattgctaagatgcagacaagcgctgttatccgtgcagcaatcaatgtaaagaaagctcatccggattggaacgttaaaccagagatcatgatcccacttgttggagatatcaaagagctcaaatacgttaagaaattcgttgtagagacagctgacgctgagatcgcagcagctggaagcgaccttgagtacgaggttggtacaatgatcgagatcccaagagctgctcttacagctgacgatatcgcaaaagaagctgacttcttctgcttcggaacaaacgaccttacacagatgacatacggattctcccgtgatgatgctggtaagttccttgatgcttactatgacgctaagatctttgagaacgatccattcgcaaaactggatcaggttggagttggtaagctcatgaagatggctattgaactcggaaaaccggttaatccaagcctgcatgtaggtatctgtggagagcacggtggagatccaagctccgtagagttctgcgacagcatcggacttgactatgtatcctgctcaccattccgtgtaccgattgctcgtcttgcagcagcacaggcagcaattgctaagaagaacgcttaattatagttgttagtagattatacatagaagcttctttggaagtacactgaaaagtgaattagaaaaatagaatctcccctcatatctgatggaatcaattagatttcattcggtgtgaggggagatttttttgactttatattgggaaagtgttatttgggggaggatttggaagcggttcaatgacttgattagcagaaattctatttggtcaacgaaagcggggaaacgttccccaagaactgtaaaaatacaaagttggtcaaaataatcatgttacgcataagattaattccaaataaagattatgcagtaaatcagcgagtatgatagaaaaaaacagtgaaaatgcataaaaaataagaaaatataaaaaattaacgcagaaagttttatttgttatatttgaaataaataaaccggttcatttattaggaaggaggcatttatgacaagaaagataaatgttattagtgtgttttttaagaattctttacggttaaaactgtgcaaattgcactaaaaaaaggaaatgaaaattgtataacacgacaaaataaacaaaaagtgattgacaaaacaaatatataaatatattattaacttaacagttgttatttaacaaaaaaatgaaccggttcacttttgggaaacagaaacaatttaataacaggaggatgtatatgaaagcaaaaaaagtattagctatgacgttagctacagcaatgacagttggtatgcttgcaggatgtggatctacaggagagaataaagaaagtggttcggatagtgagcagatcacattaaattattggacatggtttccaagtaaagatcagattcaagaaacagttgatgcgtttgaaaaagagaatccgaatattaagataaatatgacagtaatggaaagtaaagctttccaggagaaagtcccacttgcattaagtacagaggaagatattgatgttattggagttcagccatcagcatttgcagaagaagttcaggattatctggcaaatctagatgaattaatgccagatgttgttggtgcagattggaaagatgcttattcagaaaaatgtctcgagcagggaaatcagctgacaagtggagatacaaagatgcttgtgcttacaaattctggttcaatggtaggattttataatgcagctctgttaaaggatatcggagcagaagttccaaagacatttgcagagtacaaagcagtggcagaagcatttaaagctaaatatcctgacaaatatgtaagtgtatttgccggaaaagactcttgggttgtagacgagatgatgctgacagttcttggccagcagggagattattataataagtggagatatgaaggtgctcctgttgacagtgatgaatttaagcaggcaatcaatgatttaaaaaaatattttgatgaaggaatcttctcagcagatgttcttgacctggattatgcaagtgcaacagaggaatttacaaatggtgatgctcttgtttactatatgggttcttgggaagcaccattattatctaagacattaagagaagcaaatggaatcaaacttgaaaatgttggagcaatggctcttccgacagcagaggacaatggacagcttacagtacgttcctatatcgattccggaatcggtgtagttgattattcagagaagaaagaagctgcagctaagtttgttgcttaccttacattaggagatggagctgacatctttggaaaacagcttacaggaacttccgctaaaaaggattttacagtagatgcttctttatttgatacagatgaatccaaggctggatgggatacagttgttgatttgattaatacagctacagctgacagaaataacgtttcaggatattctgatatcgaaggtgctgcagtacagagtgtacttaacggatctgcaactacagagagtgcattgaaagatcttcagaaagaatggacaagtggaaaatattaatcagtaagacaattgaggatctgatgctaatataaaaaggggactttcagctgcatgactggtatgaaaaacaagtaaagcagttgatggtccctttttctacaggaattgaggatataaacatgacaagtaaaaaaacaaaattgaaggtgacgaaaagaaataacaaggcgggatttttatttcttcttccgttgattgttattttcataggattattaggatatagtttttattttctaattttaaatagttttagagatgtaacgataacatttcgcagatccgaatttgtcggcttagcgaattatcaaacaatattcaaagataaaagtttttggatatcacttttaaatacttttattttatcaacggctaacattttttgtggtttaacttttggatttattatatcaatcatactgaatttcaaaattaaaggaaaaagatttttccatgcattgttttttattccgtcaatgcttccgattgcattgatggcaacagtttttggatcaatgctcgagtataagaatggtattgtgaatcagattttaagaggagttggacttggtgcacttgcgcagagatggcttgcagatccaaaactagcaatgggagctgtatgttccgtatctatttttatgataggtattccgattatgtattacacagctgatttgacaacaatcagcagaagtattttggaagcagctacaattgatggtgcaggtatgaaagaccagttattattgattattttccctgttttgaaaaatacacataaaacaattattctttccatgcttcttggtggatttagagaaatggaacgtgtttatttgatgacagatggaggtccaggcggaagcactgagattatcggaacctatatttatcgtgctacacgatcagcgggatcaaatatagggctcgtttgtgcagctgcgattattgtattaattgtagcatttattatttcatttattcagttaaagatgacatcaaagaatgggtaggtgttggatatgagaaagaaaaaagaaaaagactatgaactcgaacaagatttatttgcaatttcaaaagcgaacagaagagtaatgatcgtcttccttatcataatgttagctttgtggtgtgtgcctatttattctttgttgaaagactctttaaaggtacatggaatagagaactactggtatgttcttacaaatgaagtaaatggtgttccattttaccagtactttgtgaattccattatcaatgctgtatttgcatctgcattactggttctgatctgttcattttcaggatttgcattttctaaaattgaatttgctggaagaaaagtgatttataatctggttttaatgtgtcttgcaatttcaggaccgattttgattataccgttcttctatatttataagactgcacatttgtttatgaaaaacttactaaatttctgattatcttttcataagttggtaaatgccgatatatcccgtattttagggctttatcggtattttcttttcggaagataccttgcataagctggcatttaccagcatgaaaatgcaaccaaaagtagtaaatgagtagtaaatatacgctccgatattaacaagccagtctttccagttctgcttttgcagattgaaatgtaccgtgtgcgtaatagccaagtgtcatggttatgttggcgtgtcccatgagatattgcagggtgtttgggttcattcctctgtttgccatatttgtacaataagtatgtcggaatgaatgtggtgtgatgttcggtaacttgtccgtgtgatatttgttatacttcttaatcagccctcgcaccataccctcatagtttcctgcaaccttaggcaagccctcacggtttaagaataggaaattgctgtaaccacctacaatcagcggttgtgcctttcctctgttctttagtattctttggattgcttgataagcccgttctgtcaatggaagttcccgttttccgtttttggtttttggagtttcaatatagtagccgatttcgctgtctttcaataactggtggtctatattgagtattttgttctgcatatcaatatgcgtcgtcagtccgcaaaattcagaaatacgaagtcccgtttccaacagaagcacaacctcatcataatacttgctgtaaatcttatccttttccataaaggcaagcaggcgttcttcctgctctggtgtaaggataactttctgctccgtatcatcttccagaacatcacttagcttaaattcaaatgggttctttctgatacagtcgtcttgtatcgccatgtaaaatgacgctttcaaggaacgcttatagttatcaattgttttataggcatatcctttttcactcattctgatagcccattctttagcgtccgactgcttaacagtatcaatcgccctcatacccaatgggtcatttttcagagcgttcataagatactgtcgtcccttttcggtagccctcttgatgttctttctttggctgttctttttctcgtaaagctggcagactgtcattttaccgccgactgtgtcgatactgtcgttaaggtctttttttatctgtgcttctttttccctcaatgaaatatcatcacgctttccagcaggtgtcttgtctgtcggtacaagtttccaagaatagataaattgtggctttccgtatatatcggtatatttataaacgtatcttccgtcttttcgctggctctctccattacgcaaattgcgatttttactgtcttttcgttttacattagacatagtgtaaagctcctttccgtcatggaatgagccgtgatacgctatactttattataccatatctacggctcaatgacattagatttcgtccaatgtatctatgattttttcaaattgttttcgcttaatctgaatacgattaccgttcacgataacccagccagcgtcaatattttcttcggctaatttacgcaattttttttcgccaatgcggaagtatttagacgcttcttcaatcgtcagcgtatatttttcccagataggcacatcagtattgttcataatctatgcaccccctttactgtgtgttgtttttttacaagcagacagacggctttggaaagctccattagtatctcaactattcccattcttgtgggcagaaccgcaccatgcggacgtatcattattctgtgaggataggtcatggcaaaacgacttttccaacagtcgctctcggatcactgcgtgggtcgctcgctttcttttggaaaggtcgtggcgtacagtccccgtggctcgctatctcacaaacgtatctgtctgctttattcagttgtcaaagagctgtggcgaaagcgtgttgctttcatgtaaaagcagggcagagtaggaaagagggggacattaaaccatgctctgctaaaaactgcttattcttcttcgatttctaaggcaatatcaaaccctaaaatcattttgataagtgcttctcggataagtccctttaactccatatctacaacaatatagacattgccgtattcatcatagagtggacgcaaacagcactttgatatgtacgggtcataaaatgccagtattttttcaatcgctttttcgtccccgtccattgcttgcgaaagcaaatagtaggacggcttcttaaatgtttgcttcattttactgcttctcctttagtatttttttcatagtttccaaagcatgatgtcggtttctaaatacaccgctttgcgtaatcttttgtaagttggcaatttcactttctgtcatttccaagaagtaatacattaacagagtatttctctttctttctggaagttttttcaaggcttctgccagctcatcatcaaggacacgaatatcaatgccacatactgaaaagattgtataatctgtttcgtagtcatcccacacagcaaaattttcaacgaaaatttctggaagttcacagaatggaatttctttatcttttcgtcgtttcaatccttgttggtagtcctttacaatatgacggacaactttcttcaaacaactttcaaagcgacattgaactgttttctggaagtcagacggtttcatcaatctcaccccctttccactatgatttgaaaagtgtttatccctctttccgcaccatatagggaatgaaaggtgtgatttaatgacctcttttgaaaaatttttaaatttttttcgggtatgaaaaaagcccgcacaaaacatatagtctgtacgagcctttaaagctaaaacatattcaatttttaatagtgtgctattaggtggaatttgattgcaaagaattgtacttaaagctttccataatgcaagcccccttaaagcaccgtatcaatgttggcatggttttcaaattactctgaaaaattatgaactgttccttttggaaatgtaatggtcagtcttgtatattctttttccgtagaagcaatatccaatttcaagcccaacctatcgcataattttttcgatagatacagtcccatacccgttgcatttgccttgtttctatttgaacccgtaaaacctttttcaaatacacgggataaatcagacgcttttattccacaaccattatcttcaatcacaagcaatatatttgtaccattgtcttgactgtatatcgtcagtttattttcctgcttatcaaaatacttaatcgcattttgcacgatttgagatagaatgaatgtcagccatttttcatcagtataaatgacattttctatgtcatggatattgataattgcttttctttccataagcgaatgacggaatttcagaatgacattatgtatcacttcgtctaactgcaactgttttacaaaatagtccttttccgtattttcacttcttgcatagtagagcatttgttccaccaactgaaatattttgtctgtttcttttttcaacgtgtaatttttcgtattatcaaacgtcaaagacaatgctcctatcggtatcttgatttcatgggcgaaactttccacatattcttgatactcctgcttttcctctgtaattttactgatttcatcattcatagatttacaggctttttttattgcgtagtaataggcttcattttgaaattcttttggctttggtaaaacgtctgcaatatagtaagtttcttccagtccgtctactaaatcaataatatgttgtgaagccccacgtttcttccgatacaaacaccattgagaaagcccttgtatgctgatgaacagaattgtcagcaatacaacaaatagcgtatctacaccgtagaaaatcaagagaaatgctactaaggcaagaaagaaaagctgaaacaatatctctgttattttttcttctaagaatgtaaaaaaactcacagtttccaaccctttcctcgtatattttccaataaatgaacaataccgatttctttcattttcttttttagacgagtcatattaaccagtaatacattttcgtctaaataatatttgtcgttccacagcttttccaatagttcttctttgctaataactttatcttcgttcataaagaagtagtacaaaatacgaaattcatttcttgtcagttcaatgctttgctcttgatatttcaaaatggataagtgtaaatcaagggtacaatcttttttgacaagctcacggaaattgtttgggtttgacaactgcaatgcacgcttgatcttctcaagaagaataagcgtatcatatggctttgtgataaaatcaatcccacccacttgaatacttttcaattcgtcagcatttgtatctctgcttgttacaaagataatcggtactggcatgacttgttttattttcctgcatacttcatagccattctcatacggcaggttaatatcaagcagaaccagttctatggaatattgctttaattcatctgtcaggtttccaaagtcagtcaataaaactgtttcatatccttgtgtgttcaataatttagaaagctccaaacgagtgatttcatcatcttcgataattgctattctcatttcaacacccccttgatttaccattataataattccacagcaggagagctagaaaaatctaactcgcctcattgatatttcgtttgaaaccgatatacgttgctatccagtaaatactataaattaggaagaagataattaaattcaagccaaagtacattagataaaggtgtttatctcccaaaatttgttgatacacattattcaatgacgacatcatcacgaaagaacataatattgctgatattgcagggacacaaaataatatcaataattgttttctgattgtcttaaatagcgacttgtcatttattcctaatcttcgcaaggtcaggtagcgatatttgtatttagtagagtcgctcaatgattgaactgccaaaattgtccctactgcggaaatcaagataaatgcaatatacataaacagactgactactattgcaaccattgctttttgttgttctatttctgcacctcttacgtttactctatacgattcgtcatttatttctccattttcatcaacctttactaattgatgttgcatatcttcttttatcttattttctaattctgcgtctgtatcttcttttgtatctataatcaaatgattttctgatacttcaagtccttgaacatatttatctggaagtacaacaacaaatctgccagtattagttatagagttccaataagacttagtgtcatatccttttaatttcaaatttttatttgctactgttatggtttcaatatctttgttatcttcaacctcatatgcaaacttgctatttgtaactatatagtattcgttatcatttaaagaaagcaacggcatctttcttaattctagtaatctattataatcacttaacttcaagactgggtcaaaatcataatattctgattggaaaaaattttgtacctgatgattcggctctttataaatgtcgtactcaatggtattatcaatcgtatattcttcttcaattactcgaatatattcatcaaatacctgcttatcatcaaagagttgtacatcatatggtgcatttaaattcacgctgatatcatacgaagctttgttgatactagaataattcagagccagcagtgaaattaaaatcaacatagacaatgtaccaaatgtgaagctcattgttcttgctttagaagcaaatgttcttgctacaaacagattatcattttgatatttcatttttttattctttaacaaaacagtcaagaacatatctgcacaagttgtagatataccataaatgctgataatcaacatgattacgcttaccatcaaataggtaagtgtttcttgcttattaaaattatccatagtacaacgtgaattccagagaaaaagagaaatcgcaccaagaataatacttaaaacaaaaatgacatttctttttttactgtcacggaacattttcttttcattttgtttatcaaagtaaagaaaatcacgtatcgtcattttacttattcttcttaatagattaagtaaaaccaaaacataaatagttaaaaaataaattatcaatagtccaatagaaacaaaattcaaagaaataaagagagtttttggaatacccagtaagtttacaattactaacgacacaaactggctgaataaaaagccaataggaatagctaatacaaatgctaaaattcccaacagtatattttcaattataactaagtgggcaatttcttttttcttaatgccaagaagcatatatgttcctaattctttacttcttttttcaaacataaatttcgttgtatagttaatcaaaaagcatatcacaaaaacaataaggatatttacagcgaacaatgaattcttaaatgcatccatactggaacataactttacaatttcatcagaacttgccaccaaattaaaagcaaatataagagaaaaggaaacagtaacggttatcagataaatcatataatctttaatatttctttttgtatttctatacgctaacttacctaacatttcccacttcacctccaagcaaggttaatatatccagtatttcattgaagaagtcttttctgtttttttctcctttgaagatttcattgaatattttaccgtctttcaagaacaaaatacgttcacagaaagacgcactaaacgggtcatgtgttaccatcaaaatagttgcctgcattttcttattgatgtcagccattgtttccagcaacaatctggaagcttttgagtccaaagctcccgtcggttcatcagctaaaatcagtttcggttcattgattaaggctctagcacaagcacaacgctgtttttgtccgccagaaacttcataaggaaatttcgataaaatatcacgaatacccaatttatcggcgatagcatgaactcttttttcaatatcagcagggttccgtttgttgattaccaatgacaaagaaatgttttcttcaatcgttaaagtatctaaaaggttgaaatcttgaaaaatgaaccctagattttcacgtctgaaatcagcaaaatctttatccttgatttttgtaatatcttgattattgactgtaatgtgtccactggttacagtatcaatcgtagagatacagtttaatagggtagtctttccagaaccactagctcccatgattgcgacaaattcgcccttgtctacatacatagaaataccgtctactgcctttgtgatatttccagagttacccccgtagtatttttttacttgctctaaatttaaaatgtgttccattaaaaatcgctcctttcttcctgccacatttatttgttttggaatacaattaaattatagcaagggcagtattcaattacacttacagttttgaaagtaaacagagagtaaaagagccgtgataatgcagatcacaattttgtgaagcatttccacgacccttttattataattttgcctttgtctttttcgtaatgatataaatatattcttctggtgtagggcgtttattcccaaaatactttttgaaatttgcctgcacctctgggtcggtgctattcatagcttcatcaatcgtagcttcaatatccgcccgaacatcagccaatgatacaccgccagcttttgcaccagctttcaatgccttttttatatctcttttgttcagtcctatcatattcatacctcaattctactttttaaagctaataagttttccgttgtattttacaatgatgaatatgatataaaacactcctacaaaaatcaaaataagacctatgtaatagcctaattcagaatgagagattaaattgataatcggcataacaagaataccaatactaaccagtaaagtgcctattcctattttttttgtaaacacctttttatctttagggtcaagttgtgtataatgataaccatgtaataaagtaatattctcttttattcctatttgataagatataaaaagtaaaaacaatcctataactatttcaacaatcaattcctctaattccataatcgttctctcctttaatcaaaataaaataattcttcaaattttttatctaaagctatacaaagcactaatgccaattttgctgttggattgaattgtccagtttcaatagaactaattgtattccgagaaaccccgactagttcagctaattctgtttgtgataattttttttcttttcgtacagtttttaatctgtttcgcaaaattaaatgttcgtccattctataaacctatcattaaaaatttataaaagtaataccccataaatagaagaaagaataaagcaataacaaatttggatttattttttgaaatatgtgcttcataacccatagagccaaatgccacagacccaataattgtcattatgtcatagtaaggttctttacaaactgctttaatgaaaagaattaaaatgcagataaataaaacaaacattaagccaaaagatttcccttgaagtttaatatgtttttcgtattcatcaagatatagattctcttttttgttttgtgatagtattttttctttatccattatataacgctcctttcaaataataccaagtacacttgtcatttatattatagcattcggtcattacaagtcaatatttttgcacagttttcttgtcgttttgtaaaagcgtgcaaatctgataggaaatgcacgctatatcatttatcctacaatcttccagttactatccttatgtagcacaagctcatactgcgatacctgcgtcgcttttgtctgattatcaatgaattttaccgcaaccttgactttcacattgtcgccgtcctttataaagatagggtttaccagttcagaataaaggtagtccctgccgataggttcaatcacatttcccaatacatagtaagcaagctctttttccgtcgctgttgggtacagcttaaagaatgtttccagaaaagcggtagcgtcatttaccgtatcagcgtccacgcttgcgtctgcttctggtgtcttaggctcatagtctgatttttcaactgctggtgcaagggtagggttttgaacgattaccatatccccgtctgcgtccacatagacttttacagtataggttgctttcacattgcttgtctgttctccctcttttatctgctgatctacttcgtaggtagcagaaaaagtgtccgttcccgactgttcgatactccatacaatcacatctgtaaccgtgagcctggttggtatatcggttctaatggtatccacattcaagccctgcaattcctttgtcagataaccgttgattgcctgcgtccttgcttcaatcgcttctttgctgttattccatgtgtaataggacttcgcaaaattcttcacgaaattttctatcccgttggtgtcctgcaagcgaagttcaatgatttctttttcatgggtggtgtgctggtcgatagccgtaaaattcttatacaccccaaagctcacgcttgcgacaagcaccacccacaacgcaatcacggttttcttatgtgtgcctaccttgacagtacgcacctttttttcttttggttctttgatagtttctgtctgtttcttattcttcttaaacatatttttcaagtcctttctattgttttactcgtcctgcaccgattaagtgctgttgccagtaactactacttaggtctgcatatcctatcgggtcgcctgcatggtacatctggttatttcctacataaatgccgacgtgtgttacatacgaaccagcgttataggtagaatggaaaaataccaagtccccagcctttgcctgcgagagtggaagatgttgggttgcgtcatactgggcttgtgcggttctcggtaaggagataccagcttttccatagcaccattgcacaagtccgctacaatcaaaggaagtgttcgggttactgccaccatacacatacttccagccttgatatttcaacgcttcattcataatcgcttgtgccgtcgcattatcaaagtgtgccacggtcagatattgattgactaattcgacgtagaacatatttccgtaaccatatcgccagcccccgttcttcgcaacggctatcgggttggtataggttactttctttccacccgatttctcacgggcgaagctctctgcaagattaaaggtgtgtttctttccttttcctgccacatatcccacatagccaccgccatagttataagactgtatcgctacattcaaatcgtcgataccttgatttttgcaggaagaaagcagggacgcaaaatacttacacccctgcttgattgaactttccgtatctaaggaattaggcggtaaaccaagactttccgaactctgcataacatcttctgccgtaccgccactttctacttgaatgatagccaatagcacattgacatactcggaaatgccgtattctctggcgtatttttccaccataggctgatgtttcaagacttctgcggataagttcatactcgtaatgccagaagaaaagttgctgttttcgtcgtcgctgtctgcactaatgaggacaccaaagaaaagcaccagagaaaagaggataggaaacagactgccaatgagagcgatatgtttcagtttcattttttcttctgtcctttcttcgttacaaggttacggcttttctctgtggtctgctggttcttctgaacgctctgggtctgctgaacctttgtcctgcggtcttttgtgtaattctggcgtgtttcctgcgatactactttttctacattctgcctatgtactggctgtgtaggctgggtcgcttttctatcaaaagcaccagaagataacggacgctcttttacaacattcgtcttgactggctcacttgcttttgaagtggtagctgtggcagggcgtttgacttcctgcgttttttccgcactcggctttgaagttgtggctggtcgctcatggggacgggtagctcccgttgtcgctgatccgtcagcctttcgctgtgcctgccttgcttcttgtgccttttgaagctccatacgcttgtcagcgatattctgtctatgctgttcctgcctttccaatcgtcccgactgtctggactgctgttcctgcaccatgccacgcttgaaatcagacacgctggactttgccttttcctttgcggaatacaccgcataagcggtctgtgtcggcatatccttgatattctctttgacagcatttgccttgtctttcactttatttttcgtatctaagacagcacccacctttgagcctgcacgctgtcccatgctggaagtggtattgccccgattttctttagaagctgtattttttctttccgctcgtttattagcaacggcacttccagccaccgcaccagcgacaccgcccgaaataccgccagcacttaccgcccttgcaatacggtgttccatacgcctagccctatgtcgcataaacagatacggtctgcggaaaattcttcgtcccatgctttgactgtcattagcgttcaaagagaacatactcattaaatcgcccagcttcatgtagataccagcgaaacatactatctgcaaaaacgccaccatgaaaaatggatagtctgtggatatgttataaaacatactggaaatactgaacgccaccgttacaatgagcgttattcctgcccgtgtcataatggtattaaacaccctcacgattgcctgctttgccatgctttcatagctcggtatcatggaaagtagaaaactgataggtaaaaacattgcaaagataataaaaagtatctggctgaacaacatcatgcccgtaagtaagaatacaaatattgttatccctaaattgaagaacagtaggaagaacaccatgcctaaacggtttaccacctgcggtatcgtcagattgttgttgtcgttgtcctcgatttctgttttcacgacttcctctctggttttcccgtcctcgtcctctgggcttgctgatacaagagcgaccacacggtctgccccgatttcttctacgttgctgttaccgaattgaagcaagagccacggctgttccacttgaatagaaaataagctatcccgtatcaagtccacgctgtccttgccctcgctgtcagagttggggagcatgatttttgttcccaaatcaagtgaagcggtactgatgtctgatgaaaattcatttatcttcttgatgtaatcgggagcataggcgataaacgaagcggacagtacgaacaccacaagaaaattgataaccgcttgaacagctttgctggtttctctttttatcagtcccgtataggcaacataaagtcccaccactaagataatgagaagcaggaaaccaacataaaagcccgtagaagaaaagccgttctgtgttacgcctgcaagggtctgtatgctctgcccgatactgtctgccatgtcattgatgaagtccagtttgtaggcttcctgcaccacatagcccgtagcattgcttaaataaaggcttatcgtccagacaaagttggtaatgcagtaaagcccgtactgcaccgattttccaatcccgtccagccagttccacggcaaccacgaccagctattatccacataaaaatcaagctggtagttggaaagcggatattttgagtaaagattttctgcgtttatggtatcgtccacaagccccgttgcatgagccaccgtccccagaagtgaaagcaggataagggagagtgccacgacaaacagagccattttgagaaagtggaaaatcttcttttttgtgaacgcaccttttatcctttctttcatcactccacctcatttctctgtacgggcggtctggtatcaaaggcgtgtagcagttcttcaaagacgggatgtatctgtactacacccacacgcccgtataagtcctgcaataagcattgtccgttctccaaatcacgcaagcgtttctggttgttctcgtcgtccttgtcgataccgaaaaactctaaggtctgctttatctcgtttatatctgtgcttctaaaggcaaacttcaagccgatattgtttttcagactttcctttgccacgtccccagaagattgtgtaacgaaatacacgcctgcctgcatagctcgtccagcacgaaccagcttgttagagagcgtttctccttgtgccacatttaagaacgcccacgcttcgtcaaggtctacaatcttaaaaatacttctgtccgaatggataaaatcaagggcaaaggtactaatcacaatcagcatagacaccgacaataattcaatggtcgtgtattcctcaaaggtcgtgtccttatctggcagtacaaggtctgctacttgaatgatgttgagctggttatccagactgattgcattttccaccgtaccgtctgaaaacagcagatgtgcaaagtcgtagtccgtgaagctgtcgatatggtctgcgatatttcttgatatgggcgtatcttcacggcgtagctcgtctatcacatggagcaagccccgactgtcgctttgggtaacggagcgtaccgccttacgaagtacggggaatttttcgccgtccctagaggaaatacccgtaaggaatgtcaagatgtcgattgccagactttcagcgtcttttacattcttcataatcacgaatgggtcaagaagtcctgcattgtccttgtcgctggtaagatttacgatattgatttcatgggcgatttctgggagcgtttctttccagttgccacgctctgattttgggtctaagataaccgcttgtcccccaaacaacaccgaataatacacaagaagattattgcagaacgacttaccaccgccaagcgaaccgacaaaagcagacgcaagggcatttgtaactgtgccttttacgccctgcgaagctaaagacggttgcaggtacacatttcttcccgtatcaacggaatagcccatatagatacccgtgttttctcctaactgctgtgtcgcaccgaagcccagcccagctagaaaatctgattttacatactgcacataatcattgatatatcgcttgctggcaggaagaaattcagaatgaagccccagcatatccccagcaggacgcaccagcttgacattgaggtcgtcgtaaaagtccttgacttcatcacaacggcgttttaattcgtccaaatcatcagccgatacacgcactacataggagagcttatacatactttcttttgtctggtctaagtccgtttccagctcgtccacgctgtctaatgcgtccaccacatttgagctggtttcacttcctgcttgataggcgtgattgtcaaggtctttcaattcctttttcttgttacggacggttgttaatgcttttctgttttctacgatttctacattcatggaagtatcaacgggaaaggtaaattgctgttgctggaaatagaagatttcagacgacggaaaatcaagctcacctacaatcgcattgacggtaaaataggatacatagctttccttgtcctcatgttccaaacgtaaataccgctggctttcctcaatcacacatcttgtcggacggataaggtcgtagtattttatcagcgtttctttctgcaatttcttctttgatagctggtactcataatcttcataagcgataccgtccctgccgtaaagatgttccatgagatacccaaaatcattgatttccaagcgacgcaccttgaagcgacgggagattttattttccagtaacttttccattttcatgtaacggttgatttcatcattcggcatggaaacaaaatcattcatcaacgtgtggttcacttcatggagaaattccgtgaacgtcagccatgccgattttttcatgttcttcagattgagctgttcttccgtaaccatgagcttaaagccaagaaaaaagcggtagtccacttgattgtccccaatcatagatactaacgcttcggtctgttcgtctatcttctgataggcaacttcctttaattttccatttaccagcttctttgactgctcctgctgacttcggattgagctttctgtggcaatctgcaacgcatgaatttttccctcacgggactgtgcaatgagctgtcggaaactgtcatgcacgataaatttctgctctgcggataagaaagaatagttgtacggtatcagctcatagtaggcaaacacctcattgtccttgttccagacaaggttattgtcaatatattttatcgggaacatagttcacactccttactgccgtgattgtttcattcaatatctgcttatgcagttttacggcttttcctgcataagtgattttcggtcttatcgcataggttatctgtgatttcaaaaagctgtacggcttctttccgtcaaaggtcttttgcgatataaaccaagtgagagcaacgggaataccgaagtatttgagaaatgctccctcaatcatggaaagtggcggaatatccccaaacagaatgatgataaattctgtaatcacaaaccatgtaatctgtgtaaaagtaacgggaaagggcaagttaaagtcattgattgcatacaagactttttccacgttccagatacccgtataagatttaatctttttcaagttctttcagctcctttcaaaatagaaaaggacagccattttcagactgtcccttaaaagagaaatacgctgtcagtagcaacaatgcttgtcgctgatcttccagcgttaatatggtatctcgcacatacctcggcttgtttcaatgaagcaaccgcccatatccaaatctcgcccgtaggcttcatagtcaatgtaattctgtaagctgggtggaatatcgccaagtgcctgcaattcgtctatgtaatagtaggcaacgtctgtcatggtttcacagtcgggataataataaatatcgtccttatgttccacgacttcttccagcgtcccgtagtggctgataaattcgtccagacattctacgatatagtcaggaagttcctctatcatttcatacatctcattgagttcttcaatggaaacatactcgccaatcgcaatggggaagttgtcggtatcatggatagcgtattcctcatactgttcattcaagccgattttttcttttacatcttcctcgtcaatgggaaacgtgaaccaagcaccgactaaatagccctcattgtatttgccaagattagcaatataaaccgccatatcatcaatcataagcaccacctcatttcctactctggcagttcaaagataccgtgttccattactaaaaattttccgtgttcctgcaagtaagaagcgtaggcttcaaagtcaaaatagtattcttgacagtcctcggataaatgcttaaatgtcgggtcgttcatcagcttttgctttgcaacatctatcatgcttttgcagtctggataaacggtaatcacgttcctgcaaatataaagtgcttctaaattctcaaacaccgtaagtagtgatacatattcttcctgcatatcgctcgaaagctggcggtacataaaatctaattcgttgagctggtacacgcttgtatgttcgtggacttcatcagcaaaaggcaacaccttttcgataatacggtaatcttgactttctgcaccgacacctagcttttcttcaaactcggcaacatctatcggcaggtcaaaccagtatgatgttgtttcttcgccagttgttcctttcgtttccaccagcacccttgtttcctgcattgttcctcacgtcctttctgttgtttcatcacatcttttaaggtctggtacgacataccaaacacatactttgaaaaatcttctaactgtttttcttcataatcggcagggttcagtcgtttcatttcatgccacaccttacgcttgtaagagggcaggtcagaaatataatcacagtcgacttttgcctgcatatccttaaaaatatcgttcatttcatcactccaatctgaaatttttgcaagaaaaaagcagtcaatcctaagactaactgctttgtgtatagggatataatttgattaagttttaaaaccagcttattttttcatctctaaattgagggttatcgctgtgctgatatggattgtagttattcaaattgcaaccatattcttttaatgatttgattttgttatcttctgtccattcaattaaggaaataccgtcaaattcttcaatacttcctgtattcatttcatttttaaaataccactctacaacagtttgatttcccttatgaaagaactgcttaatatcccaaataataactttaccacgagtattccattcgctaaaccaatgttttactgttttaaggttttcatatttaggacaccagctttccgtataaacaacatcttctgtgaaaattctatccattcctaaatcttgctgtttaagccacatatcgaaccataagcgaatgattttttctctctcattcataatagaacacctcaatcctaagactaactaccttgtatatatggatataaaattgtcaaactggaagtcaactatcttacgacaaatctataaattgcataggcaacccatataatccaagaaaaagcccataaatcaaagagaatacttactgctaaataaatgatagcaacagcgattgctattatccaatttttctttttagtattttccataatcgaccacctccacaacttcatttgtcgctttctttatatccacattataacattctcatatcagcaccacaataaaattttatgcaccgataatcttattgaacagctctaacagtacatctttcacaccgccagcgttgaataccaagccgacagcaatcaaggcaactaccaagaagccgataagttttgaaaactcacgcttgaaccctaagtagataccgataaccacaatcgccataagcactaagctttgtgcgtttgataaaaaccattgatacaaattttgtccgaaattcatttaattgtcctcgctttcttctaattgtttcattttatagtcagcttctttgccgacattcaaaatacacatcaagactacgccgatacccattcccatagataccagcaggaagtcttttactaatacccacattttttatcactcctaactttccaccaaatcttttgcaggggtcgtctgctgtttgattatcatttcatgcttttctgtgagctttgcctgctgttcgattgtttccatgtagtctgtaccgtttcccttatcaatctttttcagcattttcaaggttggtgctacctgcctttgtacccaacgcaatgtacgttctaaggtgtaaggctctggctttgtcgtcagtttcaagctctgtctgttatcgccgataaaccaagcccagcggtcattgagcttccagtcattttttcgcttgtctggttcttcatcaacaaaccgcacatactggttgatgatagaaaaagcagtctgttctgcgtcataataagtcaacaaatctcgtactgcataataggctcgttcatttctaagccgtatctcaaaacgattgataatgtcggcttcttcaagcggtgtccctaacttgacgtactgctcatagtctttttcatagatacagaaatacacatctgatttcagcgaaccaagataaagtgtacgtcccatatattctctgtcgtcctctctgtgcttgataagttcgccagactggtaaaacttataacttctggactttccgatatattcccgttttctgcatttttccgcaagctctggaatatccaaaatgcccgtatggtcgttgatagcaaggtcgatacgcttcatcacgccaccgtctataagtgcgtccatgaggaagtcataccagcttctttgctgtgccagcaggtaactttcaaactgtcggcaaccacgcccctttaattctaaaaggacacctttttcttcgtcagccgacgtatagataaagatgtcccctaaagaataatgctccgcataactgtaatgtccgtaatcttcatggagcatataattgatattcagttttaatatatctttgatgatgtgctgtatatccagcgtggaaaaacgaattttcacataatcaaacagcatggtaagcggtgcttctggattgaaccttgccagttctttatgcagagtttccagaagttcctttgacggcttcatttttccactttctatcttgttgagatattcccttgtgatacccgaagccaccgccagcctgccttgtgagataccgtaagcaatccgtttctcccgtaattcttttatccattgttcttcattcagaaccatacccccaatctgtaaagtgtgaagttttttaaggcgacttcacagccgatttttgctagaaaaccatgccagaaaccttatgtttcctatgttttttgtctattgtctatttgcaaacgtacccctctgttagataccgaggggttttacctgctggcgtggcttacgccacaccagcaacggctagtccgtgccgtcgcctttcgcttcgcacgtcgccgtcccgtcctgccttgcttgtgcaagagagccgatagtctgcaaaaaatcatgtcctttcgggactaaaggcgtataaaattcgctgatgacgcttgttcccacatcacagtagccacgccccttgatacgcttctggaaaaactgttttttcacatctgaaccgaacagcataccgtaacctaattcgctgatacgcccaagtcccacacgaaaattgaaattatctctgataccgtccgagaaatactttgcgtctggacgctggcaggcaacgataaggaaataacctgcttgtcgtcctaacatgacgattttctttagctggctaagtaagctcacactttcttttgtccccagcatttcaaaaaacgctacatattcatcaaagataagaaagcagggtggcagtcccagataggcgtagttttcgcccgtcttatagttcgggtgtcgcttcatttcctcacttcgctgtaccatgccctcataaaaggcattgacgcaatctatcatttcttctttggtgtgatacacatttcccataactgtccctaagtctgcaaggtcagcgttcttcgggtctaagatataaaggatagcgttggtatgcagtaaggcttcaataagcgtcagcagaaaataggttttaccgccaccagtcccaccagcaataagggcgtgagggagtgcgtcatattcccagacaagatttttcatcaatctaagacagccgttttctgcccgtacttcatcaatggtaatgcggttcgctatcatatcataaagcagggtatattcgatatagccgtcatgcagggtcttgtcggtcagctcacaatacaagccactttccaatttatcctctaaccgtaaaagctggtcttgatattttcccagcgtgatttcacagcggatatgaagcagtcctttttccatttgataatgaatctttggaaaccagacgattttttcccttgatctgctttgcaggtcagtaaaaaaaacgctgtcttgtacggtatcagcttcataccacttattttccagtatcattcttgccagcttttgacggtgcaggagcttcttgaaactgtcgtaaaagaagcggtaatacagaaaagcgaccaatgcacaaacaccagtcgctatcaatatggttatgaaattgtaaggggagagcgtcaaaccgttctctaacaagctgaaatgctcccaatcggtgcatataagctgtttgatattcagtagcaggagaaccgccacgaatacaaacagaagcgttccaatggaaaagtggtagacaaggtgcttgtcgctggctctgatacggtgtcctttgttccaaatcttacgcataaatcaatcactcctttctgggtacgaaaaaagcagtcaatcctaagactaactgctttgatattttaaccaccaaattttccgcaaaattatgaaagggaaaaaacataagactacttataaaatcattgcgatattcactcacaatcctttgaattatctatatcatactcatagaactcattatttagttttttaactgcttcgtttgactgttccagccattttattaaattctgtgtattttcataaagatgtgtgatatttattacttttttgccgtttgcgtcatataagcgaataatattttctgcacttttataagtaatgtcctttttatgtaactgattacgttttctgcctttaattatccaaatgctttcattatcaatgatttcaattttatttctgaaagaaagcaacaaatgtaaagaataactatccaaagcagttaaacaaattgctaaaatcaaaaccacccaatctacttctgaaattgagaaaaataataggcttacttcatagaaaactgctaaaaaacccataatgccaaaaggaaataataaaacattgataattccaatgaatacatagttttttctagcaactttcacaaaattagaattaggtatgacctttgaacctttcagtttttttcgtaacccatatatcaaagccattcccaacggaaagcaaattgaaaatataattgattttattataacttccatctctaaatttacctcttaaatataagttttgaaaaatatcctttcctcacatagactatattattgattttttcatacccatattataacagttctatatatccgctacaatgaaaatctatttaggaatactattttttctgctgtccctgcggtgtatggttctgtggactgcctgcgttctgattgcctttattcttcaacacaatatcctctgcctttacataccagtccacatctgcacccgtataggtctttcgtgataccgtatcggctactggattgataagctccacgactgcattataaggaaattcccttaacggtacttctggcggtacagacacggggataattccaccatgcagactgcacttcaaatcatagatacgctttttaagctgggtactcggtgtcccgtcctcattctgcaagaacacatcacgcaccgctgtaaattttaattctccaaatgttttctctttgtcaataacaaaaccgtttgataatctcataaattcttcactcctttacttttcttcaactgctacaatatcatcagcaactaacacataatcggtatgtcccatatccccgattgcgtaacctctgccgtataacttcggattgacaagttttactttctgttcatacttgaaatgcttttcgccagcctgcacgggaatttctaccacaacattttcgcctttctgtacgtcagaataaaggttatagcttcgtctggctaagaccctgcggttatttttatctctttcaaagactggctcgctttcgcctgcaaattcaagagttccaaaagactgtgccatatctggcacgacatatttcatttccatattgttttacctcgtttctttctatttttgataagttaattgattgtgatttcttattctggcggtttgggaagtaccagcaatcccacagatagtaaagggtaaaatcaatgcttacgcacccttgactatccgtgttcttgcaggttgtaggcagacaagtcagaataagcggaagtctgccatttgacagcttcggcggagagcgtgatttttctttcatcatatcgttaccgccttatgattttttcattttacggcgtttgtaaagatatgttccagccagtccaccagcagacacaagcaacatcacgataaatgccattacatttgtactgtcgcccgttttgggactgtcgctaggtctgttaggcttttctggtgtcggtggtgtttcgggtttctctggttcttctggcttttccttaaaggtaatcgtctgtcccttatcctcaatatccttatgctcggtaactttcttcggctcgtctggattgctcaaatcgtacaattcttcaaaagttacaagctgtttgccgtcaagagaagtagcgtcaaacgtaaaagcaacttccactttcatagtttcgctgtcagcagtaaaagtataatcactttccacacgctttccattgataagaagttctgcattttcttctttcaacatctgccagcccacaagtttgtactgtgtaccgacttctaagccctctaaggttacggtatcaatgattgttacctcttttcctgcttcaatctctttgttgccgtccttatccgtagcagtcgtatgaattttgacgatacgctctgtgataagtaccgtttgcccgtcgtcctcaatgtccttgtgttccgcaacttttacgggttcgtctggattgctgaaatcatacaattcttcaaaggtaacaaggttcttgccacctaaagcagacgcattgaatgtataggaaatttccactttcatttcttcatcatcagcgacaaaggtataattgttttctacacgtttcccgtcaatgataagctcggcattttcttcttttaacatctgccagcctttgagctgatactttgtgccttttgtaagtccgtccaatttgacagtatcaacgattgtaacctcttttcctgcaaggattgtcttttcgccgtctttgctggtcgctgtggtatggatagaaatttctttttcgtattcatcagtcagcgttcctaaatcaatcacaagattatttcttgataccacgatttcaaaaggtgggataagttcaaagcctttgttactgtcgcaacgcatttcttcaatgatgtaggtatcataaggtaatgcacctttgctgtcgtctggttcagaagtcccaaaccatacaccgtcctcgctggtctttcctgcgttggtattgtgcttatgagaagcccattcagaagaagtggagaattgtccgttatcatcagttaccactacatgattttcgcccgtcgtcttgcttgtgatcctaaagggaacatcagcaagacgcttgtgtgtgcctgcaccgatttttacaccctcaatatctccacgcttaatctggttatagatagaatgggcttcgtcggttaagtccacgatttttccattttctgtgattgtaaaatcaatcggttttgcaccgtcagttaagtaaccgttgggagcttcactttcaacgatacggaattttccataaggtaaaaggtcagaagaagtagaagcgacaccctcaatatcggtacgaattgtctttaccacttcatttttcttatatagcttgccctcaactaataccgcattatcatttaaggaaatgatgtcaaaggcagtatctttcaaggttgcacttccttgtggctttgtatcgcccgtttctaaatctcgtttctgaattttcacaccgccacggataaccttgtctgatacggaaaactggttacttccagataatacggcaaggtcgccgtcctcggtaatctgtgttacatataagcccttaatctgttcagacttatcgccagcctgcatatatgcaccctctaacaagtagccgtttggagcttttgtttcctcaacagttagcgttccaagtggaagaaccgccttaccgtcctgcatatagaaactgtcgccagataccttgtatgcgtccgctaattttgtgatgtagtgagttgtcccgtcgctgtctgtttcagcgattgtctttgtaacccatgtacgagtagcttcggcagggagattgtctttgttatagaagcctgcataatacttccatgtaaattccgcacctgctagagaagcgtttccctgcggattgtctttctgtgtttccatatcaatcttgaaaagctcaatcaaagtgtctgttactttcggtgtatctgatactttcaaggttgctgtttcgccagctttaatagtcaatggatagattgttttatccactttatatcctactggggcggataattccttaatatagactgtgccagcttttacctctgcaatgtctgtatttccattttcatcagtcgtaagggtggcaagctgttttgtgcagtctttatcagcaaagacaccgtatgttgcaccagcaacagagtaattcccattaccgtctgtaatgctggtattactggaagtcttttgcagtttcgcatttccaacattcagtttcgcccagaattgccctaattcctgcccctcgccagagtagatgtaaccgccacattcatagcgtcctttattctctttgacaaaggcttttacaccagagaaaacttcgtcctgcgtatcctttggaatttcatcataagaagctcgcacgttatcacattgccagccaagatgtacgctcaatctctgccagactacaagctgtcttaaaaggtaagcgtgatttttgcttattccgctgtgtctgtctgtgtactgttttacatattcgatagataaggcaacgtcgcttatctggtcgatactcatgcgtgagcttgcgtcagctctggtcttgtaaccattcttaaagtctgtgttaatgtcaatacagtaagcgtcctcgccctcaacagttaaatgtccctcattaaaggtagaaccaatcgaaccgtcattcattactttttcaacgataccgacacgctcttttgactccgtccagtattgcttactttctgcatgaacgggtgtagtcggtaaagcagtaacgacagttgcaagagctaagaagctcgtacacaatcgtttcaatgtctttttcataaatctaatgctcctttcattcgggtaataaaatagccgtccaataagaacggctgaaaatagaaaaggaacgtcatgttaggcgttccatagtctataagttattcaattttttcttgtttcaatactgatgtgctgtaccatatctttgcatatctaggaaaacttgcgtatcaaggctcattcgttagtagtaaataagtagtaaattgatgtgtttatttccttgaaaatgctgatagatactgtgttttagcggataatcagatttttattgtgtttttataatacacatttagcaattattctttcggagtgtttgattacaattccgtttggagtactcatgatgaaaaatttcttcgatggacttccgactgagttgatggaatcagcaaatgttgatggtgcgtctatccagcgttgctttttcagtatttatttaccattggcaaaaccagcgatcattaaccttgctgtattgcagattatgtggtctttccaggatttccttttcccattgatgttccttacgaaagacaaggcatatacaacaacggttgcagtgaatgcatttaagggagcttatggaatgactccgcaaaatttgggacgatataatgcagctcttgtattgatatctattccaagtatcttgatatttactttcgcacagaaatttattgtaaatggaattacttcaggtgcggtaaaagaatagacatgaaaggtttaatgctatgaataaaacattaaaatatatttcaccggcaaaatcatttacagaagcactaccactaggaaatggatctcttggagcaatggtttatggaggcgttccggaggaaaaaatcactttaaattatgacacattttggtcaggaacaggacatagagaagaaaaagagattgattcaagtacacttgagcaggcaagaaaattaatctttgaagaaaaattttgggaagcagaagagtatatgaagaagaatatgctcggattttataatgaatcttatatgcctttaggaattctcagttatgtgtttgaaaaggtcgatgaaccaaaagaatatgtgcgattccttgacctagaaaatgctatatttacttcaaaattcaaaaataatgaaacagaatatatcactaagatgtttatatcaaatccagcaaaagcacttgtaattaagattacagccaacggaatggacaaattggatttgaaagtgaagcttgatagcgaagtgcagcatacaatcaagacagaaaaggattgctgtttgtatgtaagcggaaatgcaccgtctaatgtacaacctaattatgttgcttgcgaaaatccgattgtatatgatgagaagaatccaggaatggcattttgttgttatttgcaggttacgcataaaggtggaacggttagtgcagatttagacggtttgaaaattcaagaagctgaagaagtagtgttttacttgacagcagcggatggatataagaagtacaatcaaaggattgaaacgaatccagaagtgtgtgaaaagagctgcggtaatcagattcagaagttgaattcaaaatcatataaagaacttgaggaagaacatatagcagattatcaatctgtttataaaaatgtatcacttgaattagaagaaatagaaaatgatttaccaacagatgaacgtttgaaacgtgttcagaatggaaaacaggatttggggctgtcatgtctgtttttccattataatcgttatctgatgatagcatgttcacgaaaaggaacccaaccggcaaatttacaaggtatttggagcgaaagtataaggcctgtatggagcagtaactggacaatcaatattaataccgaaatgaactattggcttaacgggccatgtaatctaattgaaagctttacagcatttgtagatttcgtcgaagaattaagtcatgccggagaagaaacagcaaagaaacagtgtcattgttcaggttggacagcaaatcataatgttgatatatggagacagactggtccagtagatggcgaacctaaatatgcgtactggccgatgggcggtgtatggttgtgctcacaaagttatgaatactatagatattcaagagatttggagtacttgaaaaataaaatatatccatcattgagaggatctgttttgttttgtcttgattggttacaacaaagagaagatggactttattatacagcaccttctacctcaccagaaaatacatttaaagatggggaaggacatgcttgtggcgtgagttacatgacaacaatggatttagcaattataaaagaattatttgctaactatttggaagcatgtaatgttcttggaatcaaagaggatttgatcgaacaagtgaatgagcgcagtaagttattaccaaattatcagattggaagaacaggaaagattcaggaatggattaaagatttcgaagaatttgatgttggacatcgacatttctctccggtatttggattccatccgggacactcaataaagaaaacagatactgaattagtaaaagcatgtcagaagttcattgaagaaaaggttgcaaactataaacagcaaataggatggagttgtgcatggctcattaacttgtgggcaagattaggtgatggaacgaaagctaattactactatgaagagttgttacggcaatcagtttataacaacctttttgaccttcatccgccattaggtgaaacggaaggagaaagggaagtattccagatcgacggtaattttggaagtgcaagtgctgttgctgaaatgcttttgagtagtgaagatggaaaaattactattcttccagcattaccagagagttgggaaagcggaaaagtaaaaggtcttctggctgtaggtggagttgaggtggatatcgcatggaaaaataaaaaaccaatttcgatttcactttgttcttctgtagatcagtctataaatattttttatggaaataagaagttaacggaaaaaatagaattaaaaaaacaggagcagcaaatcatagatctgcactcctgtgaatggatttaatcatgttaattgacggatgctttccttataatgcatggttggtttgtgcattatcgtttttggataatcagagtagtcaccacaaatacgtctgtaaagaagttttccagcctctgtgcccatgacattagtaggctgttcagcaaaagacagtggtggatttactacatttgcaagtggaaagttgtcaaatccaataaccgagatatcatctggtatttttaatcgtaaatagttaattgcaagataagcaccaatagtcatatcatagttactgatgaatatggctgttggtcttttttggagtttgcacaaacgcatcatagcttcataaccaccgtctatacagtaatctccgcattgaatataatcatctgtaattgttaaaccagcgtttgtcatcgcttttttatatccatttagacgtccattactagtataatgattcggacttccggtgataatagcaatatctttatgtcccaaatcaattaaacgttgagtagattcatatcccgccagttcattatcaagaacgatgcaatctgttgcatgatcttggatttcctggtcaagtagaatcaatggaatattacttttctgaatcatttcaatttgtttaccatcggaggcgtacggaatcagaacgattccatcaaccatacgatcaattagatactgagtttttcgcaattccatttctgcattgttgtggcattcgcacacaataacactatatcctaatggtaataatgttgattcgattgatgaaatcatagaagtacaaaatgtagaatctaacattggcaacaaaatagcaacagagaaagattttgcattgcgtagtccttttgcgatattgtttggatgaaaatcaagttctttgattgcttcttctatagctaaacgagtattttcttttacagttttgccattaatgtatttagaaactgtaccgacagaaagtccggcacgagcggcaacatctcgaattgttgaagccaatataatgcctcccttcataaatatgataattatataaaaattttagcataattaataaaagaaatcaaatgttataaaaaatgctttctgaattttaaacatatcgaattcaataggtttaaagtagaattaatgatataagcaaaagtaaatgtcccaataatcagtagagcaatgaatgatttgctgatgtttcctttatatgaatgagttaatctatgagataatataagaaaactgcaaaaatgttagagctcgcttgaaacaaaaaacaattatttttgaaaattaaggggatattttcattttaaatccgtctaatctatgtaaataaaagctggctggcaaaaagggggtaccaaattgacgaaggaggcacttggagaattgattctttcatcagagcgacaattgtatgcaacagcaaaaacaattttgtcagatgaccaggattgtgctgatgcaatacaagaatcgattgtgaaagcattttctaaaatagatacactaaaaaaagatcgctatgcaaagacctggttgatgcggatattaatcaatgaatgttataacattgcaaggcgcatcaacgtcaatgaacctttggatgaaggatatgcagaaaatataaagcaacctaaagagaatcgggattacagtgaattgtatagagctgtaaacgaactgaaagaagaactgcggattccggtgatcctttattatatggaggagttcaatataagagagattgctcagatccttgagatatctgaaggcgctgtacaaaagagacttgtaagggcgcggaaaacgctgaaaaagaagattcaattggaggagatttttatatgagattagacgaattaaaaaacgactttccagatattccggactttattcacgatatgattcaggaagaagtagaaaaacaagtaaattcatcaaacattacaccaatgcagagaaaaagcaagttaaaccgaagtataagcagggtagcggctgcggcagctgtgtacattattgcaacatcaaccgttgcttatgcaggaacaaagctttatcatatgtaccttgaaaaacagggaaactacggtactttaaccaccataaaatcagatgagaattctgaagacgtaaaacttccagaagaaattcatgaaatctctgtcacatcaaactatattccagaaggaatggagtggatcgccgaagggtataagttaggctataaagatacacttgatacagcagggataaccgttgatactgttttgatggatgagaagagtctggataaatcattgttggatagaaatgttatagaaagtgaaaatcatgttttcggatcctatgatggaatttatctcaaatacaatacaataaatggagaaaactcatttgatcaaagaatttatcttctgtgtccggaagaatatcgtgttttgagcctctatattggaaatacaatttcaaaagaagaagcatacaaatttgctgaaaatcttgtgattacggaagaggatgaaatgatcaaaactgctgacatgattacctggagtgatattattgaaccgacagtctatgcagataaaatagatgtaacaaatggtcagctgccggttcgtcaaattggagaagcttttaatttagattcttatgctgaagataataacggaaataacattactgcagataaggtgacagcttgtgtagataaagtacagatcgcagataatttacagcttttagacagtgataaaattccgaaagtctggaagacggcagttgatgcaaacggaaaactggtacagaatcatttatcatatataaaaaaaggtgatggtgtaaataatctggattcagttgtaagagaagaaaacatggatcagaaattactgtttttgactgtcacatacacaaatatatcagaggaagaactcaatcatatgctctatctaggcacgctgattgctctttcgaaacagaatgatggcacgtatactatttacatgcctggtacagaagctggtgaggattatgattattatataagtgacagtgttgccaaaacagctgaaatgacttattccagcgtacaagatgactatggtcaagggaagaattatattccatcgttaaagcctggtgagagtgttcaagtcaatatggcatggattgttaatgaaaaagatattaagaatttatatttgaatctgaatggaacaggaggatgttatgaaataactgaaaacatgtgtcatacaggagttgtttatgttgggaaggaatgataacattttcttcgtatcccgaaaaaacggttttatatttatgagtccaggtctcgaacagaatgattcaattataaggaatatagtatggagcattcctgtaattcagatgccattccagaaaggagatttctatgaaaaaagtgcaaaagtatttctattgcttcctatctattctctgcttgtgcattcttacatttagtttgtcaggctgttccgagattaaagatagaattgtgggaacatctgcgggaggtggaaagcctgaaggtgaagcacctaagtcagatgtgagcattacaacagaaaggacaaagcaaatcggagatgtttgtgaacttaggacaatgtcggacaatgattttgacacttctactgtgagatggaagtgtatagttcaaaaagcaaagttgtatgataagccgttggatgcggggatagacacaagcagaataataacttcggagtactataaaagtccagagatgcctgtatgtattgatgcaagtgtggcggcaaatagcatggtgttactatgtgatatagagattgaaaacctaaatgattttgagaatcttaatatcacatctcttgacttggtttctaaagattctaaaggcgaagcacagcaagttggtttaccaaattatttttctcacgggggaactgaagatgctaaatattatgattttactctgacaaagggaagcaaggaaacagttcaggttgggtggtatatagattcgaatgatttagataaggatagtctgtatttagcaataggcttaggaactgctttgaaagatcaaacctccttggctacttatgtaaatttgaacttataaaattggaaattcttagaggtgcagtatatgaaaaacacaataaaactggaaatccacaaggcaataaaaaataaattatttgttatttctgtgcttttggggtgtgccatcacaatcttaagcttgatttaccaagtgaacgtctctagtttagactttgcagcaagtggaaaaaatcctatgatctcggcatatacagtttttagtacatggattggaggtgatgggtattctttgggtgcttctgtttatttttttatatttccattgctaatttcaattccctatggatggtcctattgtgaggagaaaaagaatggttatataggagcagttgttgtaaaggcaggaaagacatcttactttttggcaaaatatattgcggtattcttgacaggtggtttagccatggttatcccccttatttttaactttttacttgccatgctgttttttcctgttgctacgccacagcccatatactctacaatctatgggatatattatagttctttaatgtctgatttattttacacatatccgtttttatatgtatttttctaccttactcttgattttgtatactgtggtttgctttcttgtatatgtttggcagtttcgagatggatcaagcaaaaatgggtggttgtcatattacctctgttcatctgtcttgcactgacctatggacagcgttttatttatacttcccctatgacggttcagtataaacagacctccccattgtattttctccatccggtagaaatacagtatcctgcatcatggttcttcatcctcatatcagctttggttattttcgctactaccttgttgattcaccttgtatgggagcgtagtcatgaaatatattaaaatgttttggattgattttaaaaatggaattttaaaaaacgtactcttgtttttttgtcccatgattctggctgtgtttactttttgggatgcatggaatcgtatacatggggttaaagaaattaatttgtctttggctgcttatggggattactggttttatgtttacggtggaatgcagaaatatgtgccgggtcctggtaacacattccaagttccaattatctggatggtcgttttcatattacctgtgttccttctattgaattatcctgtaaaggatatgcaacatatgggaacacagatgatggtacgtatcggtgggagaactcgttggtggttatccaaatgtatgtggaatgttttagcaacagtgttgtaccatgttcttttagcaggcatccttttggggctgtgtttcgtctttaacataccattaagcagtcgtattcatgtagaacttttgggtatgctatttaatttgtttggtggaaacacattgctaccacgggaaataataccaactgttattttcctcattcccattctgtgttctgttgcatttaacttgctacagatgaccttgtgtctgtttattaaaccgatttttagtttttttgtaacagctgttttactggtgtcttctgcgtatttgctctccccgtacattcttggtaattacgccatgcctcttcgttacagttggatattcgagggaggcgtttcttttcaggtaggcattgttgcgtctgtgcttttggctgttgtagcggtgatcattggaatgatacgttttcgcaagtatgaaatattgaatagggattaaggaggaagaacatgacgaaaatagaacttaaacatgtatccaaaacgattcataaaaatgaggtactccatgatatttcctttatgatggagtctgggaaaatatacggattccaaggggttaatggttcgggaaagacgatgttgatgcgtattatcataggattgattcatcccacaaatggaagtgttgaaataaacgggaaagtgcttggtcgagagctagaatttcctgaaagcataggctttcttctggaaaatccagcttttctggatcgttattctggatactccaatttaaagttgttggctgagatacaaaacaacatctccgatgcagaaataaaagaagtcctttctcttgttggtctaaatgaagaagcaagtaaaaagaagtaccggaagtattctctcggcatgaagcaacgccttggaattgcagcggccattatggaaaatcctgatattattatcttggatgaacctacgaatgcattggatacggcaggtgtgaaacttgtaaaggatattcttcaaaagcagaaggagcgaggagctttatgtattctatcctgtcatgaccttcctgttttagagagcctgtcggatgagattatcaagttagaggaaggaaaaattatcgaacatataagcttatcaaaagcgggaggaggaactgaattttgaaaaagagaagaaatatactcctatttattagtttgtgccttatctgttcatttgccattagagtctactttgtaaaccgtgatgtatctaagccgccaatgaaggaatataaaaaaggagagatagttacctttgatgaggagtattcggtagacaacaggaaaattagcgagggatacactattcaaattttggactccgagatattgtccgttgaagatttccaagagaagtacaatctctcagagggagatttggagggacagtataatttcacaaacgcgtattatgtcgtaaaggctaagtttacaaacgtaaacaatcaagagggcgaagaacagggaatctcgcttctcagtcttccgttggttgggaaaaactatatggttgtatttaatgccattgcctatcctcacttaaatccaactatgcctattggtggaggattctctcttcgtcctggtacagatatgacagtgtatcttacctatgcaattatagcaggaaatgcaccagatatagaagaacttcgcaaagatcctccacaactgcaaattgcagaatatccaatccgaaaaatgcttgatataaaatgatgcaactgaaactatattcagataactttctatattgttttaggagaaaccattatttatgattgcataaataatcaagataaccgaggaacaacgaaactaattgtgccgttgatatcgtcttctaaaagattgaacgtaagtaggtaatacaatggctttaacaggatatcctggcgagcatacatatgaattatgggaaggtgttggacaaatacagtctacgatcggagcttttttttaatattcaagagctaattttaaattccataacacgctttcatcttttattacaaaaattatagaagagagtgtatgtttaaagaatacaacggaggaagaaaaagaagtgccaatcacttatctgtcgttagagacaccaggcgttggaacagcaatctcacaggaacttctaatgggaaattcagaacattacggttctatggtagaaaaattagaaccaggagaagagaaagtagttatgtatccgtatgaaatatgttccatatggtttcataaaaaagactggaagaatatagagatgagaagtttttggatgacatttgcttcgtatcctgataaaattgttttatatttataaatgaggaacaagttaaagaatgccgaaaccgttccccgaaaacagcaaaaatgcacagcaagtcaatggagtgaggagaaacttaatgaagaaaaaaataatatatgtcttatgcattttaggtgtgcttttggtgttattaggactgaaaaaaagaaatgacacaatgtattcttcgggggtataccatcttaacagaagcgggattgtagaatctatagagaataacaatatagttgttcgtttggataaattgaatgaacaagatgaggattttaaaaatgtcgatacactgcagttagattgtagaaattgtgattatgaattagaaaatctaaaggaaggtaaaaaaattatattttactatttcccatataatgcagacgttcgaccacttaaagtcgagaatatctatgtgataaatgaaaaagagtctaatattgatttgatgaagaaagccggacaattattggatccctatcgagataaaacagatgagtctatttacgcaagaggtaaatccggtggtgttattactacaaaggatattgaacaagatactgaattttacattttagcagggtatgaacagtcagacgctgaagataaggcagtagaatatatgttacaacgcgatgcaacttatcaaagagctattgcagtgggatattctgtgtctgatgatgaaatcaatgattatttagatgatttaaaagttacaataaatgattcgattaatagtgaggaggctcaggctcttataagtcaatttggttcggaagaagaatattggcagcatgaatctgaagtttataagataaatttaccaattgaaaaatatttagaatcattaaaacaagaatatttgaagaatagtatttctacacaatcaaataatcaagaggcagaggaaacaatagaaaattataatcgttatattgaagaagttcaatcagagttggttaaacaagagtaatatgaaatatttgaatgatcaataaatgtcaccaatataaaaagcgtgaaggaagggattcttttgttaaaaaagaataatgaactgaggaaaggtggatatctaaaaagttttcataaggatattatgaaagttgctttttttgtatgtattttatttctattattttttattatacatacaaaacttcaaaaatctatagaattacaagttcttgaagttcacgatacctatctgatccttcaagatttaaagtattctaatgactatagggtacatttggttggaaaagaatctacggattttaatgtcggggacttggttatagtgacatacaatggcgctgtagaggatacagcacctgcttctttaggtggtgtcacggaaattaaactttaaaaaaaataaaaggagactgtcatgaaaaaatatgcagaatcgaaaggattctttgattttaaagcagaaagggaattatattccattgttaaagcatggtgagagtgttcaagccaacgaagagagaggatattgttgcccgagaactgcaaaaacaggaaatctatacagaaaaaagaaccgacaattgttttgaataacaattctgggttcttttttagaaagcgatttggtttcacattattatttgatatttttttctatattcagacggggaaagcccgctttgtttcttgaaaatacggctaaaatatagcgggttttcatatccgatcgctcgagaaatttccgatatattaaaagaagtattttccaataagttttttgcattagagatccgtaagaataaaaggtactgggtaggagtagtacctgtatattgtttgaaactttggataaaccaactgatactgaaattatgggaatgtgcatattcatcaatgcttattggcgaattgtaattttgtgaaaaatactggacagcccgttccatttcctgcattgtcagtaaattgctctttcgtggcttttcactggaaagccggtgcgtcagaattaatagttccatcaaatagtagacacaaagttcttcgtactcacttttgcaaaaacgtaattcatttataatagatgtaaaaattcgtttatattcaagagaagtaccggtataaattatatgcatatcatcagaaataccatgctgtctcaaaatattcgttacattattcccagtaaaatgaacccagtaaacttcagtttggtctacaccataatagtagtagcgttgctcttctttggggcggtagatcaccatatttccggcatttacaatttctttcttaccatgaaaataaaattctccttttcctgaggcaatataaataagttggaaatctaatcttccccgaggacggtgtgttggtaacttttcgacggttttcagacgatatgtgccgcagcttccaacaaaaagcggagattttttatctttaaaatctctgcggtttttatgccagtaagcagaattaatatacatgtgaaatcacctttcatttctaaatggatcggaaatattcagatcttgattaatctacagtatatcactttagacatattctgtcatacagattcatgaaaaaatatagttgctgtaaatatgcacaaaattggagatggaaaattgtgaataattacaaaagatacaaagaaagaacagaacaactgaaaaaagtgtggcattttgtgtatatatcgtataattcagtttatgtctttttgtaaaaaaccagaatataatgaaacagtgctgtagataaaccaaatgataaaatctacaaatgggacaaatttagttataggtatccactggggtggaagaagggagcaaatgtacgattatggaagagaaaaaataccttaaatggtataacaaggtaggttatggttcgggagatctggcaggaaatgttgtgtatgcattcttgtcatcattcgtaatgctgtatttgacaaatacagtaggtttaaatccgggtattatcggaacgttgatcatggtatcaaagttatttgacggaatcagcgacatgttctttggaactatgattgacaaaacaaaaagcaaactgggaaaagcaagaccgtggatgctctatgcgtatataggttgtgcggtaacacttgtagcaaactttgcaataccggacagtcttggaacaacagctcagtatgcatggttctttgttgcatatacactgttaaatgcggtattctttactgcaaataatattgcatatgcatcattggttacattttgtacaaaaaacagcagagaacgtgtagagatgggatcatggcgttttatctttgcattttcaacaagcttgcttattcagtctgttacagttcagtttgtaagagtagcaggcggtggagcagctgcctggagaacagttgctgtagtatatgctatcattggattgatcgtaaatacaatttccgcattttcaatcaaggagcttccggaagaagaattaaaagcagggaaagatcatacagaagaaaaatatggtctgatagaggcagcaaagcttttattttccaataaatattatcttatgatctgtgctacttatatttgtcagcagatttattcagctatgttaaatatgggaatttattacatgatttacatactgaaaaatgaaaatttatattctgtattttcatgggcaatcaatattcctgtcatcattgcaatgtgtatcacacctatgctggtagaaaagatgaaaggtttatatagaatgaatcttgctggttatattctcggaacagcaggacgtgtcggagtgatttttgccggttatatgggcagcgttccacttatgcttgcatttacagcagttgcagcacttggaatggcaccatggcagggggatatgggagctgtagttgcaagctgttcagaatatacataccttacaaaacataaacacattgacggaacaatgtattcttgtacttcctttggtacaaaaatcggaggaggaatcggagttgctctttgtggatggttacttgatgcaagtggatttgtgaaagaagcaacaatccagccagaatcctgcctgaacatgttgcatgttatgtatttgtggattccgatggtattgtcattgatcattacatttatcatgtcaagaatgaatgtagaagatgcgaacaaaaagcttagaaaacagttggaggagtgttaaaatggaatacaagggtatgaaagaggacgaacgtttaatttcagttacaccaagcaaaagacagattgcctatcagaatatggagtatttttgcttcattcattttacagtaaatacttttacaggaagtgagtggggattaggtgatgaaccggaatctatcttcaatcctgaagagttagatgcctgccagtgggcaaagacagctgctgaaggtggaatgaagggattaatactgacttgtaaacatcatgatggcttttgtttatggccaagcaagtatacagaacatagtattaaaaactcaccttataagaacggaaaaggtgatattgttcgcgaaacagcagaggcatgtaaagaatatggtctgaagtttggagtttatctttcaccatgggacagaaacaatgaatcttatggaaaaggcaaagaatacgatgactactatgtgaaccagcttacagagcttctgacaaactacggtgacatatttgtaatctggcttgacggagcatgtggcgaaggcagcaatggaaagaaacaggtttatgactggcagagatattatgaagtgatgcgtaaactccagccaaatgccgtgatctcaatttcaggtccggatatccgctggtgtggaaacgaagccggacaggttcgtccaagtgagtggagtgtcgttgcagcagatatgacagatccggtgattacagcacagctcagccagcaggaagataatgaagagttcagaaatcgtccgttggatgaaacacaggcagatcttggaagccgtgaatgcctgcgtaatgaagaaaaattagcatattatccagcagaaacagatgtttctatccgtccgggctggttctatcatgaggaagaagatgatcaggttcgttctttcgaaaacctgaaagagatttatttatcttcagttggtggaaatacaacacttctgttgaatcttcctccgatgaaaaatggaaaacttcatcagacagatgttaataatgtaaaaatgcttggagattttataagaagcacatttaaagataatctggcagatatcgctgaaattacaacagttccggagaaggatgcggaaggtaaaaatgcggatcttttaagagtagatgattatgagaatgtgttcagaaataaagccggagacagagaattgacaattcatctgcagtggacagagaaaaagaaattatcttatctggtattaaaagaggcaattcctttcagccagcgagtagagaagttctctgtatggtatgcggcagaagatggaaaaaaagagaaaatggtggatgctaccacaattggttataagaagatcatcgatttgcagggcgtagaaacagatgcaattgaaattcgtatcgaagattcaagagttgctcctgtaatctcgtttgtaggtgtatactaaaatagaacaagaaaattttaacaaacgaatcccaaaaatcttttttgggatttgtttggaaaggaaggaaaaatatgaatgctgatatgaaatggttggataatccggaagtatttaaggtgaatcaattagctccgcatagtgatcattcctactatttggattattcggacatgaaaaaagagaaaaacccattatttcagtcattaaacgggcagtgggagttttcttatagtaaaaatgtaaaaagcagaccagttaatttttatgaggaaacatttgatgcatcaggattcgataaaattatggttccgggacatattgaactggctggatatgataagatccgctacattaacaccatgtatccgtgggaaggaaaagagtaccacagaggagcttacagcatggaggcaaccggagcagaaaaaggaatgttttcagaagcagagtacaatccggtaggttcttatatcaaatactttgacctggataagagcatgtgtgggaaaagaatccatatttgttttgaaggtgtagaagaggcgatgtatctgtggttgaatggtcagttcgtaggctatgcagaagatagttttacgccttctgagtttgacctgacaccttatataaaagaaacgggaaatatgctggcagttcaggttcacaagatgagcacagcagcatttttagaggaccaggactttttccgcttttttggaatctttagaaatgttactttgaaagcgataccggatgtacatatggatgatgtatggtttcaacctgtgttgaatcaggataatgtgagtggaagtgtatctgtcagaatgaaagtatctgcaccggatgctcagaatataaccgctgattttattttaaaagacagggaagaaaatctggtagcagaaaaatctgtacagttaaagaaagaaaatgaccatttagatggtacaatctgtattgatttagaaactgttagactgtgggataatcatgatccttatttatatcatgcgtatgtagaacttaaagcagaagatggaagtttagtagaagtaattccttacgatattggtttcagaagaattgagattattgataaggttatttatttaaatggaaaacgcctggttattacaggagtaaaccgtcatgagtggaatccaaaaacaggaagatgcattggattagaagatatgcgagcagatatcgcatgtatgctcagaaataatattaattcggtacgcacctgtcattatccggatcagataccgtggtattatatgtgcgacaatgcaggaatttatgtgatggcagaaacgaatctggaaagtcatggatccttccaaaaattaggggcgatcgaaccatcctgcaatgtgccgggatctttcccacagtggaaagaggctgtacttgatcgtgcaagaaataattttgaaatatttaaaaaccatacatccgttttattctggtctttaggaaatgaatcttatgcgggtgatgacattgaagcaatgaacgtttattttgctgaaaaggaagatggaagattagttcattatgaaagttcttattacaatagggcatatgaggatacgatttctgatttggaaacaagaatgtatgcaaagccggaggatgtagaggagtatttgaataacaatccgaagaaaccatatattttatgtgaatttatgcatgacatgggtaattccatgggaggtctgggagcttatatgaagctgattgataaatatgatatgtatcatggtggattcatatgggattttatcgaccaggcaattctcgtaaaggatcaggtgacaggaaaagaagttttacgctatggcggagactttgatgataaaccagcggactatgaattctcggcaaatggaatcgtatttgctgacagaaaagagaaaccggcaatgcaggaagtgaggtattactatggcttatatagataaattaagagtggtctatggtgactatacacttggtgtacatggtgaaggatttgattatattttttcttatgcacaaggcggactggaatctatcgttaaaaacggatatgagtggctgtaccgttgcccaaaacctactttctggagagcgctgacagacaacgacagaggaagcaagttccatatcaaaagcggaagctggctttcatcagatatgttcattgattgcaaaggaatacaagtcattatggatggagaagtgcagaaaccatatgcaccggacaataacagcttcggtggtgatgtttttgctgatgagatcattgtaaaatatacttatgagacaatatccaatccgtcaacaacggtacttgtgacatatacggttgttgcatccggaaaaatccaggtggatgtacagtataaaggagtaaaaggacttccagagcttccggtatttggaatgcgttttatcatgccaatacttgcagataaatatatctataaaggattatcaggggagacatatccggatagaaaagcaggtgcacaaaaaggtgtttatgaagtggcggatttgagcctgacaccttatcttgtcccacaggaatgtggaatgagaatggatacagagtggcttgaaattagcagacatacaagtcttgataatagtagaacagatcagtcatcacagacactccgtattgagaaggaagacaaggaatttgctttttcatgccttccatatacagcatctgaaattgaaaatgctctgcatcatgaggaattaccgccagcaagaagaactgttttatgtgtatacggagcagtaagaggagtcggaggtatcgacagctggggaagtgatgtggaagacgaatatcatatcagtgcggaagaagacatcagatattcatttgtcatttgttagtaagcagaggcacagcaacagcttgcgctgaaagatgttgttttagatgttaatgtaaaaatgcaataataaaatctcccctcatatctactggaaccaattagattccattaggtatgaggggggattatcttacaccaatatagtaatctaaaatttatttgttgaaaaattttgcaaataaatgctaattaaatgatgtatcattatttatcttttagaatgctataagcttctaaaatgccttttttcacgccggttttgatagcaaaaattaatattggaattattataaaaataaacaataaaataataagtaatatcatttgtatatccataagatacctccagtaatatataataatctctcgaaatctctaagctagcaagattacgagagataattatactgtattgaatgtttacaagtttgttttcattgtaacatattatttataaatgtaaagtaaatagacaagaaacctctgaaatttgcaagctgtgtcagagcatccgttactgttcattgaagcacaaaagcatacatgatataatttacaaaagatttttttcagttggggtacaatttgtaccctaacttcaatggtagcaagtgacggaaagaaatatcggacaaatgctgcaacaatggaggggaaagagtttgctatcctaacgtaagtaggtaatcatccgtattacctacttacatcaaaagggagaacaattttagaaaactatctaaagttttctacatttataactctggaaaaacaatcgcacaaatttatgttatgagtgaccatgattatagtaattcctttttcatttaattcttttagaagtttcatcactatcaattcattttctttatcaagtccagaagttggttcatcagctaatatgatctgacttccttgtaaaattaatttaataattgcaattcgctgttgctctccaccgcttagctgatatacttttttgttaagcatatcatttagctcaaactgctttaaatacttattgattagttttagtttttcttctctttttatttttttatattcaagagctaattttaaattccataacacgctttcatcttctattagcccataattttgaaacagatatcctattgtatatcttctcaaaatcatagcatttttactgttcatggacaaattttgatgaccgtcaatagtgattattccctcagatatatcagtaatcaatcctattatatttaaaagtgtcgttttacctgccccacttttccctacaagtcccacaaattcgcccttttctatttctaaagataaattttcaaatagaacctgatttttcccatattcttttttgacattctttaatgtaatcaatgacatatttatgcccccttttcaatctcatataaagcatttgagatataaactttataaagcaattcgtagaatatgtagtcaataagtataatcgcaaaaaggcaagcaaaataatagtttataacggttaatacgcctgatataatgagttcaattcctaaaaaaatataccgatttttcagtattctaaaatgcgagaatcctaaaatctcttttgccgcatatctctttcgatttacaaaaatatctacataatttgaaatatacaaaacaaacagtaaagatactataaagacaatcgtaaacgtagtgagtgttttaagaacgaatgtcacattttcaagttgcattaaataaggtgtgagtaatgttccagctgtaactaattgctctaaatcatattctgataataaagaagaaaaatgttctcttgacttcatttgaaaaaatagacatcttgtatttaaagagtccaaatagtaaagtcctgcaaaattgcccgtatcaacaatgataataggattaaccatatccgaaaaaccattctctgcattaacttttattgtagaatcatcgtctatataaacgacattaaaattatcaatagttttttcttctcccggtagtccataaaattgattgtaattcattaatcggaaatattcttgtttaatatattcgctaatagaattttcatcattcttatatttatgtggaactaatactgttggttcactgaatatatcttctcccaatggttttccactgaactggatattggaaaattcactcagataatttctatttgcaataacaagctgttgctcataataggggcgtgatatctgcaaaccatcgtttatcctaaaatcacatagtagtgaatggttatgattatacatctctaatgtttgttttgaatagttttctaatatgtctgtgtttgctaacgcataatcatactccaatgaattaaaaccattagcggtataatatccgtccagatacttataatctaaaacagcttgttggctttgtctaaatgagtttccctgcttaagtaatgaaattatagtaatagcaattattaccgaaaaaattatttttatagtctgaactacaatatttgtgccgctatttaaagtcttatttttgatcattgcctctaaagaaacaaacttaattaaaatacttgtaattaaaacacaaagtacatttatagttaaaacacccataaagaacagtacaattgttactaaacaagaaaaatcatatctgtttgttaatgcgtaatataaatttaacaagaccagtaatacgaaacatgttacagaaaaatattttattatacttgtaatttgttcctttaaaatatgtatagtagaaaagcccatgctttttttaatacctatttttttcaaactataagatgtgtaaatacaatatatgatttgaagtacaataaacaagattacaaaattcagaagattcaattctaataccatactatacggaatagcgtcgttttcaaaggtatttattgtgacagacagttgagaagcgatctctttgattgcgttaactggtaaatctgtatagaatacaccaacactatctaaaaaatcttccttttgcgattcatgatattgaaacaaaatagaggaagatataggctgtttttgtgtaaactcatttaatggatagcaatataaatcataaacagatttatctgttgaagtgagcgtattattaatgagttctaatttattttgagaatatttttctgtaaatattgtatagaatttgtcgagaatttctggcgatgtttcttctaaaacatacccttctaacttctcagtagcgatattgttcttttcgtaaatattgtagattgaagtattaaaaatatatgctaaaagtataatttcaagaaaaataaaaatcttcaaaaaatttttcataatatacacaattcctttgaaaaaatgagacggggcaaccaaccccgtcctaagtgtttaaagtagctcagtatggataatactcataatgagatgtttcgtttgcccaccaaactctcttagcttctttataagcatagttcgacttgaacccactggtatatgtgtctccgccgacctttacagtggcctttaccatatagttgcgactaatacctgctttacgcccaatttcggaatatacaacggtgtctgtttgcccaccattgtaatacaaatctccacctgctatattaatagcccatgctgtaagtggagtaccggcaaccataactgttgctacaagaccaattactttcgttctcaacttctttactttcattcaataaacatcctttattttttataatttcattggaaaaacctctttcactaagtagatatacaaaatttatgggttcttcttattgattaaataaattataacatgaaattttctttttaagtaaaactgaccgctaatttagaaaaactgaccgtattttaagtataatgtcttttgcgaaattaatttgaatataatattgaaaaataattggattacgattgtagcaaatgaagaaataatgtatagtgaatttatggtgtatataaggtgggtaaatctcacagaaatggaggatgctgttaaacaatataattaaggattactatctatttacagtgaagtagataaaacaaaactatttgcaataagaatagtgctatagataaaggtcagtaaatctaagttcgcgccatttatagtaaaaaatgaaaaaaatatgtttttttgtgataaatggcagaaaacaaaattacatctttgcttgcaacttgaaatatgatggaggaatttaatgatacggattgctacattagatgatgaaacgcagtggcttacgacagaaagaataattactgagcaatgttttgaatctggagattatagtttttctgcttataatgatgtcgataaatttttattagaattgaaatataaagaaaatgatctctatttattagacatggaatttccattagaaaatggaatttcagggctttccattgggagagagattaaagatttatatccatctgctgtaattatttatgtgacatgccatgcagaatatgcaatagaggcatttgaagtaaatgcatttcggtatattccaaaaatattattggaaaagaaacttccagaagcttacaaagtattagaacctgagattgggcatcgaaaagaggagtactttgaagtagtgacggaaaaacgtatggaacgaattgcaaaaagtcaaatttattatatgtataaggaaaaaaagtatgttgttcttatacattcaaagggggagtgcaaaatcaggactagtcttggagaaatacaggaacgcttaaatcaggactgctttctcaggattgataaaggatgcgtggtaaatataaaacatattatgtccgtagaaccctatcaggttaaaatgcgaaccggagtttgtcttacagttagccatccgcagtttaaaaatgtaaaggataaaattgcggaatattggaggaaacgaaattgattaacatttgttatggaattacaagttatattattattataataggtcttttgagcgtgttatcggtatttccccagcgaagatggaagtcacgtgttgtttatattattttttacattttaatagcaggtggaattgcatgggaatctcaagattcaaccagagggtttgtaacagatcttcagatgataattaatccggttataaatctcttgttattaaaaatattttataagatatgctatcgatcttctttactttggttatggttatataatatgactacagatttacttcgtattcccttactcactatacggggagtttatgaaaaaactgatgtaatgcatacaaatgtattaggtggaagaaactattgggaatgcatctggaatctattgattatttttattttcattttcgtatatagaaaatggaaaacacaaattcagatctttgtaaaaaaaattgaaaatagttggaaaacggcattatttattttgtgtatcgacataagcgcattatttcttgtgatgtggatggcaggattttttgatggaggatattatagtaattttaatttgataaccaatgtattgcttatacttattttgcttttgctatttattatttatgtgtttcgaagtatgtacaggtacaataaactggagaagacttctttagtagaacaaaaggaaatattaaccaaggaatatcaattcattcgtacttattgtgaattggaagcaaaaagacttcatgaggtaaagcatacctatctctatcttctcaattgtatcgaggaaggaacgttagaatcagcaaaagaatgtctgaatacacatttagaaaatacaaggaacagagaatggaagatatggacggggtttatggatcttgactgtattttaaattatgaatatgaaagaatgcagcaacaaaagattaaattcacgcaaaaaattgaactttataagcttccggtaaaaggggaagacatgatgattattatgggaaatcttctggaaaatgcaatggaagcatccatgaaatgtcaaattgaggaacgtagaattgaactgacaatccaacaaattaatgaaattgttttcttggatgtgaaaaattcaatttcagatacagttaatttaaatggatttcaatctcaaaaagcggacaaaattatgcatggatgggggataaaaaatattaaacagattgtagatgaaaatcatggagaaatgcagtgcgcttgtaaagatggaatgtttgatgtaaacataatttttatggaggataaggaatatgaatgaggaattgaaatacgaagaaattctattagagctaaaagaagcagaaaaactggatatagatgaaatggaagatgcaccagtaataagttatggaggtggatacggaactttcatttgttgttaaaggaattaatgaaagtttagcacagttgaaaagctgtgctatttttgtattgtgtaagatataagatctgaaaagaggatacataaatgtggacagaaattcttggagaagatatttacaggataattgacaagggatattgccggttacttgtggaaaaagaagaaaaaatattaaggcaagggatacaaggtgaattacttcagttatttcaatccaatcaattatattataaaggggcaatatcaaaagttaatttcgaatcattttttcgcttttttatacagataggtattgattacatagaaagaagtaataagaacagaaaaatcctttacacaaatagaacagaaaatttagctattaatatagtaaaagcaattgtaaaaataccaatgcgttgcttgatttatgaaatacatgagcataagaaatgtgggaaactcaaggggacaacagctcaacaggaatacatatattatgagacggcttatctacagaatcccgaatatattcgaaatttatgtagaaaatatcctgagatgtttcgtttgattttgttaaggataggtcaggtaatagaagaaactaatgaaatttcaaaatacctggaagaagatcaatcttttatagaagaaaaaatcttaggtaataaattttgcaagattagcaaaatttcattgggaaaatctgatacacatcatggagggcatattgtcgcagagatagaagtagagaatggacaaaaaatcatatatcgtcctaatgatatagaaaaaaataaaatatattttcagatgtatgattggttaatggtaggcagtggtttagatgcaagttacagaaaactcttaagttaccagacacatagttgggaggaatatgtaaaatacaaattttgtcagaatgatcaagaagtaaagaattatttttttagatcaggaatacttctctttctttgttatctcacttacagtacggatattcatggagaaaatataatttccaatggggaatatccggaaatcattgatttagaaaccatgcctggccatggaaaagataaaaacagtataggggaaaagaagttagatgattttgcacaattttctgtgctacagacaggatttttaccgatgccagcttggggagagtcagaaggtgaaaattttccaagtggtttacatactgatgcaataataaaaacaaaaattaagattccgacaatttgtaatctatattcatctaaaatagaaatgggacataaagacggaacgattcatttagaaaagagtattgtcagaaaaggaaatcagactataaagatacaagagtatatagatgaaatatgtgaaggatttaatcatgcttatcggagaacacttaatcgaaaggaagaaattattacattactttctgaactagacagaaagaagagccggtatctgatacggtatacacaacaatatgacatgtatttaaatacatccttcttccctgaatttatgaaaaaaacagaaaatagaatctattttttctatgtattgaagaaaaatagaaaacaagaagagtatagtgatgctttttttaagtcagaactatcagcattattgaactttgatattccgatctattattcaaatgttcaaaataatgaactgcagccagaaaaagaggagtgtagtaaaaaaaaagaagagcatgatatgagacggtatatgaatcgtttgtcagaagatgatttatttaggcaaattttgttaattagaatggcgttagggtataatttaccagaagtaaataacagtcgttacataaagtttgatgaaaaatttaagacacctcttgacatggcaaataacttaggaaagattttgatgaagtggaaatcgaaagaggcagattgtacatcttatcaaggattaaaaatttatgttgataagtggcgtatagaaacaatagatatgagtttgtataatggaatttccggattagcagttagttttgcgttattgggagtgtatactggaaatgctctatggatgaaagaatgtaaaaatctttcagaggaaatgtatgattatacggataaaattgttcgaaaagtcaggaaaagtgaatctaatcaaacaggaatgttcgaaggtgaaggctcaattgtatatggatatttgattttatacgaaatattgaagcaaccccaataccttaaatacgccagaaaacatatgcaaattgtgaatgatttagttctgaaagatgaaaattatgacctgctttcaggaaatgccggatggataatcgttttaatgaaattttatgaaatcacaaaagataaaacaattttgaattatgtaattcgggtagagaaagagttatggaaacatcggacagtacttttaaatggcattggctggattcaaaaaaaggagaaggtgatcttatctggcatttcacatggaaacagtggaatgattctggcgtattcctacctgttaaaaaataccagaaagaaaatatataagaaacgaattgatcttttattaaattatgaggattccttatactcggaaatacatgaaaattggagggattttagaaaagaaaaaacatcatgctattcggcaaatacgtggtgtcatggtggtagtgggatacttttatccagactttcactagtacaattgagagagtataaaaataattctattgtgaaaagagatattgaaagaggattacaatgtcttagtaaatggaaaggtgaagaacggttatgtatttgtcatggcttgagtggggtttatttgattttcagagcttgtgctaagtcattaaacaacccgaagtatttggcggaagcagaagaggttcgagaaaaaattttaataagggataaaatggcaattaaagaatttggagatttggcctttatgtctggaataggtgggatgatatgcgtgttgtatgatgatttagatgaaataatatggtaattatgtgtaaaaatcctattgaaagaaaataaggtcagttactttgaaataacggtcaatttaatgcgattagaaaaaaatatgttacaatcaatttatcaattaaatgtcgccaataaaaaagaaagggagatgaagagtatatgaaaaaaatacgtcgatttttaggaataattctatcaatgtttcttttaatcaatttaagagttaatgtaatggcacaagaaaataaccaagaagtattattaacagaagaaatggctttgaatttagcttctaattatgcggcaatatttacagataaagaattggttccttgtaatccaacaaaattatatgaaacagatggtcaagcaataggatacataattgaactatattatcgaggagcaccatatggttatttagtgtttgataataatgtcgaaggacttcttgcggaaatttcattaaataatgatggggatacaccacaagaggaactattagaaaaatttccatctaaagtacgtgaaaaaaaacggatggaaaaggtttataaattagatacggctatttatggtatagcaacagataattataatgaatttattacaaattataacgatgttgttgaagtatcaaatataaagagtgaaaggtcgagtaagccaacttcatgggaagatgtttttattgacaaaaaatatgatacaaaagatatatacatatcatcaatggggcatctgccagagttcattgcttatgatgaaactactgtagaacaaacaacccagcattatgcttgtcttatttcagcagctatggtttgtgctacatattatggatgtgcagattattcaacactagcatcagattatatgacattatggaatttaacaggaacaacggtcagtcatacaaaggatgggattacatatggggagactaatcccgcaaatggggtaaatggattgaaaaatttttgcgctcaaaaggggatagtgataacttcatctgatatatggaatcctacactaccattttatagaacagctattaatagaggcgatatagggatggttcattgtggaattagtttatcagacggaagaagtgggcatacgatggcagttgagggatatgcccaaattattgtaaataatacaacatttaatacagcaatggtttcggatggttgggataatggagtgcattatcttaatttagatacatcacaatattcagatcttaaaggaacagtttttaagctgtagagaaaatgaaagtcatgaagaaaaaaataatatatgtcttatgcattttggctgtgtttttggcgttattaggactaaaaaaaagaaatgacacaatgtattcttcgggggtataccatcttaacagaagcgggatagtagaatctatagataagaatattatagttgttcgtttggataaattgaatgaacaagatgaggattttaaaaatgtcaatacattgcaattagattgtagaaattgtagttatgaattagaaaatttaaaggaaggtacaaaaattatattttactatttcccatataatgcggacgttcgaccacttaaagtcgaaaatatctatgtgataaatgaaaaagaatctaatattgatttgacggagaaagccggacaattatttaattcctatcgagataaaacagatgagtctatttacgcaagaggtaaatccggtggcgttattactacaaaggatattgaacaagctactgaattctacattttagcagggtatgaacagtcagacgctgaagataaggcagtagaatatatgttacaacgcgatgcgacttatcaaagagctattgcagcgggatattctgtgtctgatgatgaaatcaatgattatttagatgatttaaaagttacaataaatgattcgattaatagtgaggaggctcaggctcttataagtcaatttggttcggaagaaggatattggcagcatgaatttgaagtttataagataaatttaccaattgaaaaatatttggaatcattaaaacaagaatatttgaagaatagtatttctacacaatcaaataatcaagaggcagaagaaacaatagaaaattataatcgttatattgaagaagttcaatcagagttagttaaacaagagcaatatgaaatatttgaatgatcaatatcgtgtcaacatgaaagacttttacgtacggttccgtaagaagtttgaggtgaaaattttcttacctacttgattgatatgagctgaagttcacgaatggaagttttgaataccgtcctggacggagtccaaaagacgcggttcagaagataaaagaatacgcagaacaggaatatacaaatacaaaaacggaagaagagcagaataaagaaaaaagagaggaggttataaaggagtgatatgaataataataagattcaaaaaattttccactatataatagttcttttgctcgtgattctttggtctattatgatgttctttcctgagcacatagatactatgaattttaaaatatttttttctatttcacttgcttgtaccatgatttactctttctgtagaaagaaatacttttctatgcaaacatactgtaaaacagaaaaatttgtttttacttttttaataatactgctttttttaaggtttatgttttggaaaaattaagttatagaaatagttctgtctatagttgaagcggctatcctttgggatagccgcttttttcgtaaaaaatcatttatcattacttttgttcagcctatgagaaaaattctcatgggcttttttattttgaaatcatcacttgacattgtggcaaatatttgactgccttctcatatcttttggaatgttagttatactatatttccaataatataaaaaggaaaaaacgataattgcggaagaattttccgtatcataatatttcagttttgtattcctttttgatttcagcatctataaattcaatagacaaatatttattgagaaaaataaaaaaatttgtattttacttaacatttgcctagttctatacgggagatatagagaagggggtgtaagacgagaccaagaaattttaattggagtccagctaataaatgtcaatagttaaatgaaaaaattgctcttattttctggctaaaaaagggtagacatcccccttggtgaaaatatcgttcttttgaaagatattgattcgttggatgtacagtattttatgcagccatgtcgcatttggaagcattgtattgtttgatatgctcctgtggagtgatgatttcaaaagacttgttgtctctgagtattgcaaatatcatattgcataccttatgtgaaacagctcccattgctacgagctttggttttgagtcacatttcttgaggtagtactcacgaagaactggatttttagcttctccattacgggagatactaatgctttgtaaggttaacgtgtgaataacacgtctagctatggcagaaccacgcttagacatttgaactttggtaccttcaaattttccggattgttttactgccggatcaagaccgaaataagcgaaaagttgttttggttttgaaaaggctgaaaagtcaccaatctcacccatgatggatacagcagacaagaaaccagcacctttgaatgtttcaatcaaatgaatctgcttgacaaagtcggcatcttcattagcatcaacaagctcatggagcgattcaagaatgttgttgatttcttcatcatatttacgtatgaagctgatataaaggcgaatacgcttgatgttgctgtctatgatgtaaccaaactgatttgcatcagttgccgcctgaattatggcattatacttattttgagcatatgtaagcccaaagcgagctgttgatttgatgatatcaataatctcttgcttgtctgcttcaagaaaagcagagggagatgtataagtctccaacagtgtaagagaagtgttgattgtaaccttggaaaagatgccgagatactgtggaaacgccatgcgtaattcaccctgaagcttattcacatagagcaccgcgattatccattaaatcgtagtattcacggcataggttacggcagtttagagcaaggtctgaaggcataagtgaaacctttaaatcaggtttcaaaccaaccaaagcagcttttttagaatcaaaacgatcattatgtacttttcgtatgttgatgtttgtgctattcttagtgatgataggattaataacagagcagttaaaacccttatcacgaagatagcagaagagtgggtaatgataaattcccgtggattcgaggaaaatgcgactttccaaagaatacaactcttctgcttcttttattttagaaacagcggttgtaagggaatcaatactgctatgtaggattttgtaaggttttcctacgaattgttggtttggaagtgctatagacatccaggagaagtcagcaccgacatcaataccaacagagatgaataaatcatcgagattaaagataactttgtttgacatgagcaatagctcctttctgataggaatccatttccaatctggcaggtacacaacctagcgcgttattcgggtatggcgcttccggctcccaaccagctaaaacataaaaccctgtcgaatggactaattgacttcattgtaggtatcagtcacaagagtgacttcccaaggaggtgaacattctttgtcctatcctaagagataataccttatgttttatctggtgtctatcaggaaccgtcagacatgatcattattacggataacatctgatgaaggaagaaccccttcttctgttatctgatttatagaaacttattaaccaagtagtcttgattgactacatcattattatactaaggaggggaaaatatgtatcttgaacttacagatatcagtaaaaaaattggagcagatgaggtcctcaacggaattacactttctatggaaaaaggaaaggtttatggactgcaagggaaaaacggttgtggaaaatctatgcttatgcgagtaatctgtggattagtacttccaactgtgggggaagtaaagattgatggaaaaattcttggaaaagagttttcatttccaccaagtgtgggtgtgtttattgaaaaaccaggctttttagattcttacagtggattttaaaatctaatgatgcttgcgtcaattaaaggacaaatcagtggggcagaggtgaaagatgttataaagagagtggggctacaggatgtaatgtacaaaaaatatcggaaatattctcttggaatgaagcagaaactagggattgcagctgcaattatggaaaaaccagaactgattatcttagatgaaccttcgaatgcattagatgaaaagagcgaagaaatattatggcagattgtcggtgaagaaaaggaacgaggagcattaattcttatatcctgtcatacaacggagactttagaaaaagtttcagatgaaatttttagaatggatatgggacaaataaaagagcatatgacagtataggtgagtgtatgagaaaaaagatcatcatcattatgacggcaattgtattatttggtggatttatagccgggtatcgaaatataaatcaaaaatatccggcaagaaaagttgagacagcagaaaagggagaatctctcgaatttctggatggagttaaaatctcagcgaatggaataaaatggctgtccacagaagaacaggcagcaatttatgagaatagtgggatagatacgagtaaagtgaattatgatacaaaaataacagaagtgagtgtatgtctgaagaacacaacggaggaagaaaaagaagtgccaatcacttatctgtcgttagaaacaacagccgttggaacagcaatttctcgggaacttctaatgggaaattcagaacattacagttctatggtagaaaaattagaacccggagaggaaaaggtagttatttatccgtacgaaatctgttccatatggtttcataaaaaagattggaagaatgtagagaagagaagttttggctgacattttcttcgtatcccgaaaaaacggttttatatttatgagtccaggtctcaaccagagtgattcaattataaagaatatagtatggagcattcctggaattcagatgccattccagaaaggaattggtaatattactgcaggaaggaaccaggttacgagtatgggagagaatggaattgaagggctttgacagggaaggaccgattctagagggggattttgctgaaaatgaattaatgaaactgtttcaatcagggggagttgctgttttagacttaattaaaaatataagaaatgaatgggaaacagagtaaaacatcggttgctccgatacagatttagcaaccgatgtttttgcgtttttttggaaaaaatccctttagcgtaagatttctgttataatttatatattgaattttgaaatcgaaaacggagccgataattccgcagaaaatgaggtggtagcataatgaaaaacacgattatttatcatgggagtaatgtagaagtatctaatcccaaaatacttattaatggttactataaggattttggatatggtttttattgtacaaatatagaaaaacaagcgaaacgctgggcattaacaaaaaaaggcgcatctgtcgtaaataattatagttatcttaaaaatccagaacttaagattctctgtttttctgaaatgacagaagaatggcttgattttgttgtaaattgtcgaagaggaaagatgcacacatatgatattgtagaaggtcctatggcagatgatcagatttgggattatgtggaggattatacagcagataaaatttcgaaagaagcgttttgggctttggttaaattcaaatatcctacccatcagatagttttttgtacggaagaagcattacaaacattgcattatgaagggagcataacattatgacaaataagtacttcccagatgaagaaatacagacaaatgatttatatttcatctgttatatgattgaacgtgttgcccgaagaattcatcagagaaataaatatgtggtaaatgcaattggaagggagtcactagtgcatttgatcagtgtagcaaatgtgcttcattgtgagaatcctttgcaggttgaggatgattggatcgaggaatatagtttggtagaaggtgatttcgatattacagtagttgataaagaattggtagaaaaaatacctacagcattagaaatgggaaaagtatatcagcgtcttatttctgatacattagttccggaagaagattatgtagatggaattatccgcgtatataataatgaaatctgcgatacgatagataattataattgcagtgcattttatgaaccatcatatgttatcgcaagagcctatcaaaacgggggtttttaatccgcggattaatccgtagaatcaatattccttgacatttcaataaaaaagtttatacttaaaatagtttgaaattcaaaataaaatacaggagaattgaaaatgagtataaacaatcaattgaaaataggtgatctgactgcgaagctcccgatcatccagggtggtatgggcgttggagtcagcagaagctctctcgcaggagcagtagcgaaagaaggcggagtaggaattatttcgacagcacagatcggttatgatgaggaaggatttgagaaggatcaggctgcatgtaacaatagagcaatccacaagcatatcaagagagcgaaagaaatcgcgcagggaaatggtcttgtcggtgtaaatatcatggttgcgctgaaacattatgcagagcatgtgaaagaggctgtggcagcaggcgcagatgtgatcatcagcggtgcaggtcttccgatgaatctgccggagttggtcagtgagacttgtcgcacgaagattgcaccgattgtttcttctaagagagcagcacagctgatcttgaaaatgtgggcgcataagtatgacagaacagcagatttccttgttgtagaaggaccgaaagctggaggtcatcttggattctcaagagagcagttagatgagattgatacgatggattatgatgaggagatccgtcagatcattgcctgtaaggaagagtatgaaaagcgatacgagaagaagattccagtaattgtagctgggggaatcttcgacagggcagatattgatcacgcattggaacttggagcagatggagtccagattgcgagcaggttcgtggcgacagaagaatgtgatgcgtcagaggcgtataagcaggcctatatcaatgcaaaagaagaggatgttcagattattcaaagtccggtaggaatgccgggaagagccatccgcaacgcattgatcgagcgtgttgagaaagaaaaagagcctattaagaaatgttataattgcttagcgaaatgtaatccggtaaaagttccgtattgtatcacgaaggcactgattgatgccgtaaaaggtgatgtggaaaatggacttgtattctgcggaagcaatgtcggacggatcaatcagatgatgagtgtgcatgagctgatgcaggagcttgtgtcttagataaatgtgaagaatccaaagtcatattaataaaagtaaaaaaagagagaatagtgtgaaacaaatttaaaatatcacactattctctttttttatgatatacttaaaagatatcagacatgaaagcatgagatgtgttactgcctccgtcacaagggggattagagcatattggtgttagaatattaatgcttattaaactataaagaatttataaggagcagcgaggatgaagatacagaataacgatacaaaagacgaaggactgaaaggaaacgagaagattgaggaagcaatttctgcgctccagcaggaagtgtctcaggaacttttagcacatacgttgacagtgatccgcagacgaatgaaagaagaaggacaattgattcttgcggtagagccttctgttgcagaagaactgaagatacaggcagtgaagacagctgatggaaagaagtggtggagtgcatttacaagttttgaagaagaactgaaaggttctgatcgtgtgatgtctacctttttgacagcaatcgaaccattatttcagtccgctgtacaggtgaatgagattgaaggtatcattttgaacccatggaaccggacaatcatgcttgataagacactgcttcgactgattcttggagagagtggaaagtgagaacaaagcggaaaatgacagtaactataatatgtattttatttgcagtgctatttgcctgttatgggttctggatgagtggaaatggatctgggacgggattcttcctgatctggtttgtattagctgcattgcttggaggatgcgcagcgattacatttctggatggatgggaaagacttccgatgtggatgttgtggatattaaggggaatactgcttatatttgtagtttcctttgtaattatcgaaggatgcattattagtcagatgcatgcgaaggcagatggaaatctggactacatcatagtgcttggtgcacaggtgagagcagatggaccgagtaaggtgctgaagcatcgactgaacacagcaatcgattatctggagaagaatccggagacaatctgtattgtgtcaggtggacaggggtataacgagccgtgtacggaagcgcaggcaatggctgattatatggaagcagccggaattgagaaagaccgtctgattctggaagacgaatcaaagacaacagagcagaatataaaaaacagtaagaaatatatcagagacggagcaagtgttggaattatcacaaatgatttccatatgtttcgggcgatgcagatcacaaaaggacaggggctgaaatcagcggaagcgattgctgcaggctcgaatccattgtatctgccgaataatatgcttagagaatatctggcagaatggaagtatctgattagatcaatcttataaaagcaagaaaagagagatgaaagaaacaaatgggtagacgagaattagaagaacgaatcgagaaaagaagagaggactttgtaagaaacagtcttctttcagatgaatttattgactttgtacaggagaatttaaagccggtcaacacaatgatggcttattatcagtgtgcgatcatggaagttgagacgaaattcaaggtgctgagcgaacagtattccctggagtatgaccgcaacccgatcgagagcattaagactcgtgtgaaatcaatggagagtctgttgaagaagattcgtcgtaaaaatattccattgacgattgatgcaatcgaagaaaatattcaggatattgccggtgtgcgcgtgatctgtgcatttcaggatgatatttacaagcttgcaaaatgctttcttgaccaggatgatgtaattctgattcagaaaaaagactatattgcgaatccaaagccgagtggttacagaagtcttcacctgattgtaaaaactccgattttcctgaaagaagggaaaaagatgatcacagttgaagttcagcttcgcacgattgcgatggatttctgggcgagtctggagcataagcttcgttataagaagagtattccggaagaacagagtaagtatcttgcagaagagatgatggattgtgcacagatcagttcagctcttgacgagagaatgcagaaggtacgtgatgtgatcatgcaggcagaggaaaaagaggaagaaaaaagtagtggagtagaaccattaatgcttcgaggattgacagagaggatacgacagaagactttttaaagaaattgtctacataagcagagattcgaagtgaacagtacggaggggaaaactatgattaatcgagaagatatgctagcgctgaccagacggatgacagtaaaacggacatcgatcactcggatcgccggaagctatatggatatagacggatttatagatggaacatttaacaccagttttctaaacttaaatcctgcagaacaggagaaaaatctggcccttgcgaagaaagtaccgtttgcaaagacgaataaaaacttgaaggaatataagttttgtgatgatcggagaaatccggacagtatgtggaaacttctaatggggatgcgtgcctgcggtctgaaaaatgatgctctgatggagaccttttatgagattgtcggagaacattatcaggcagatgaggattatgcgatctatgtttttcatgacagatatgacattccggcgaagggattggatcatatacgtcagggagaatccgaaagaatgtatgaatacattttgtgtgtgatctgcccgttgagtggggaatacgaaccgggcgaaccacaatgtggatttctgtttccggcattcgtagacggaggtgcggcgatgaactatgtggatatttatcaggaagacgaagaatatccgcataatgaattagttgaattgcttggagtggagaggaaaaaattatggcagaaataagcaagtcaggagaaaaagtaaaatatcggctggcagaggcgatgaaagaatgcatgaaaaaagcaccggttgagaagatcactgtgaaagagatcacagaagaatgcggagtgactcgtcagaccttttaccggaattttcaggataaatacgatctgatcaactggtattttgataagatactgattgaatcctttgagcatatgggagagggacaaacagtctatgaaagccttgtaaataaattccaatacattcagaaagaaacacttttctttcgtgcggcatttaaaaatgatgaccagaactgtttgcgtgatcatgatttcgagctgatcacaaaattctacaccgatcggattgaaggaaatacagggaaaaagatgtctgacaagattcgcttccagttagaaatgtactgccagggctccatctacatgacggtccagtgggttctcggaaaccacaaagccacccctgaaaccctggctagattcctctccgaatccatgcccgcagaattatgtcaggtatttaaagaaagaggattactgtagttcatattcagaaagattcatttctgtccacagaaaatttatacgaatccttctaaatcgttgcgcgttccgtaaatctatttcagcccacagaaaatccggaaatgagaggataaagtgaatcaccgcagaaaggtgatgcatcgaagatggtgaatgtggagtgtgcttgataatacttgaaaaacttaagattacgttaaagaaaggtttggaagctgtctgagcggcagcgagttttccaaacctttctttgtatttagtaatcttaacctatattattcacggctatgccgtgtgaagtggctgaaagccacatgattactgtattttaattgaatattgctgtttcacctatcaagtgaataaaaaaagagcatccatttgtggtaaaattaaggtgtcgaatcttaaataataacccaaaggagccctttatgagtattgtaaacaccttatcactagaaagcaatagacagattaaaataaattttgatggaggagatttatcctccgatgcaggcttacttcttatcaaagaattcgtaagcaaacttggccttgataaacttttcagtcactcatttaagaccaatgattctgcatcatttagatatcacactgacaaggagaatctccttcagatgatatatatgatcattgcaggttactttgaagatgatgcttcagatgaacttacaaatgatccagtatttaaagcagtgctaaataaagatgctttagcttcacaacctacggtatcaagattctttaatcgtatggatgaagatactttaaaccaattccttacaattggcagaatacttcgaaaaagagtttacagtgttcagatgccacaggctgtcattttggatttggattccactcttcttgatgcatacggtaaacaggaaggcagagcctttaacgttcattatcaaagcaatggataccatccgcttgtctgttatgatggattgaccggggatttgataaaaatccaacttcgtgatggaacacagtattcctgcactggagtggttgatttcttgcaaccaatacttgatgaatatctgaatgattatccgtcaatccgaattctgcttcgtggtgatagcggttttgctacacctggcctttacaagcagtgcgaggaaaatggcacaaactatgtaatccggctgaaggagaatggtattctccgtggaaaagcatcccatcttgtggatgagcttgatgaaatcactagaaataacaaagtcgattatgcagtagtttatggtgaattcatgtacaaagctggtccatggccttatggaagacgtgtagtatgcaaggttgaaaagccggaaaaccagatggtttacatgtacacattcattgtcacaaacatggattcatcaccagagtatcttatcaaattttactgtaagcgaggactgatggaaaactttatcaaagagagtaaatctggttttgattttgcttccgtaagcagtcatacccgaattgtaaatgccaacagacttcaagtacacgctcttgcgtataacatatttaattggtttagacgattggcgttatcagcaaatatgcgaaagcaacgtattgataccgtccgtttaaaactgctgaagattgctgtaaaagtagttcgttcagcaagatatatcacattcaagctttgcagtagttgcccttataagagtgaattctataagacaatttttaatatcggcaagctaaatgtacagctggaatagcacctattaacgaaccttgacagtttaacaattgctctgaactctgcgatagagactttgcgcccttttgacaggaaaattgagcgatgttatgactgcatggagcatttttaatttcatggtacagttatcagttcagatattgttccatgaataattcaggcttaagtttttcctagaattatcagtacacgtaaccctgagccagattcgatgcgtcacccttcgaaggagttacaccttatcacatttcagcattttcgcccgtgtaccagaaatcaatttacataagttttctaaagagtgccttcagatcctctacgcttgcatctttcgggttaccaggtgcacaagcatcagcatgagcagactcagcgaggaactgcagatcttcttctttcagagcttctagctttgtcgggattccaacatcaacagaaagtttctgaacggcatcaacagcagcttttctgtattcttctacagacatgtcgtcaacacctttaacgcccattgctcttgcgatttcacgatatttctcacctgtgcagtcagcgttgtattccataacgattggaagcatcatagcacatgcaacaccgtgtggagtatcgtatacagcaccgagtgtatgagccatagaatgagcgattccaagacctacattagagaatcccattcctgcgatatactgtccaagagccattccttcacggccttctttttcattttcaacagcgcttcttaaagattttccgatgatctcgattgctttgatatggaacatatctgtcatttcccaggcagcttttgttgtatatccttcaattgcatgtgtcagggcatccatacctgtggaagctgtaagtccctttggcatagaggacatcatatccgggtcaacaactgcgataaccggcatgtcatgtgggtcaacacaaacgaattttctctttctctcaacgtctgtgataacgtagttgattgtaacctcagcagctgttccggctgttgttggaactgcgatgatcggaacacaaggttttgttgtcggtgcaacaccttcaaggcttcttacatcttcaaattccgggtttgcgatgatgataccgattgctttagaagtatccatagaagaaccaccaccgattgcaacgatgtaatctgcttcagctttcttgaatgcttctactccgtgctgtacattttcgattgttgggtttgctttgatatcagaataaatctcataagcaagtccattttcatcaagaatatctgttactttctttgtaactccgaatttgatcagatcagggtcagaacatacaaaagctttcttaaaggctcttgcttttgcttctgtagcgatctctttgattgcgcctgcgccgtgataagatgtttcatttaacataattctgtttgccatgattttcgatctccttttttaaaaacagattttcgggaagctttagaggtattcccgatgtactatgtctttattttaacaagcacaaataaaaaagaaaagttacaaaaggttgaaaatgtaacattttaagcatttctttgtgaaaaagtcttgaaaattataaagtctttattaaattattgtgaaacaagcacagaaaatggattcgaatactagacgagatgacgagaaagttgtaaaatctaattatagttttgaatctggaaacagatcacttacggaaggagacaggcattatggagaaattaacagacaacttaaagaaggtaatactggctggaatcggagcagttgctataactgctgagaagtcaaaggatgttcttgatgatatggtaaaaaagggtgagcttacagtggagcagggaaaggttctgaatgaagaactcaagcacaatctgaaacagactgtaaagaacaatgtgaatgtgaaggtaaaagttactacaccggaggaattgagtgaacttcttgataagatgacaccggagcagttagaagcactgaaggctcagatcaaggagaaagagtcaactgtagattcggaggcagaagaagtggacgcagacgatacagcagaagaagtagaagttgttgaggaatgagtgagaaagaaaagggaacgaatggttcaagatttagagagattgtttcggtgcttcgcaagcacaatatcacacatggactaagtccgaagaaacttcgtttgatcatggaggatctcggtccgacatttgtaaaaatcggacagattatggcacttcattccgatgttcttccgaaagcctattgtgacgaattgatggagttatgtacagatgcaaggccgatgcctttcgaggaggcagtagcagtaatcgacgagtcttacggacgttcttggaagaaagtattttcttcgattgaagagacaccaattggttctgcatcaattgcgcaagtacatagagcagttctgaagacaggagaagaggtcgtcgttaaaatccagagaaaaggcatttatgaaatgatggcacgggacattgagtttatccgtaaagcgatcaaactgatgccgccgatcagtctgaaaggaatggctgattttgatcttgtgcttgatgaactctggtcagtgacaagagatgagatgaatttcctgacagaagcagcgaacatcgaagaatttgccagaagaaacaaggatgtcaatttcgttcagacaccggttctgtatcagcaatatacgaccgttcacgtgctggtgatggaatatattgatggttgcgggattgatgagaaggataagctgctcgaagatggatatgacctgaaagaaatcggaagcaaacttgtagataactatatcaagcaggtaatggatgacgggttcttccacgctgatccgcattccggaaatgttaagatccgtgatggaaagattgtctggatcgacatgggaatgatgggacgactgacagagcatgaccgtgagatgatcacgcttgcaatcgaaggcgttgcactcaatgatgttggtctgatcctgaaggcggttctcggattgggcgaattcaaagaacgaccggagcagagaaaactttacgaagacattgaaggattgcttttgaaatacggaagtaccgatatgggcaagattaatgtggcagaggtcatgacggacttaatggaagttatgaaagaaaataagatcatgatgccacatggactgacgatgcttgccagaggacttacgcatatggaaggtgtacttgccaatatcgcaccggatatcaatatggtggagattgccaaagcaagactagctgcggattttcttcacaattttaactttaagaaggaattgaagagcacaggaagaagccttttgaaatctgtgcggaagatgattgacattccatccatgacaacggacttaatggatgaattcatgaaaggccagacaaaggtgaaccttgatctgcgtgtgtcaaaggatctggcatttcttttgagacgcttggtaagaaatattgttatgggtctgtgggtcatggcacttctgattagttcaagtattatctgtacaacggatatgacaccgaagtttatgggaatcccggcacttggtgcgttcggatatctgatggcagtggtgattatgatctatgtatttgtgaaacatattttctcaagaaagtaaggcgaaaaatggcaaaaagaagaaaaccgggaatgctgttggcgagttctgtaattccaaacggatatgaagtactgtatgggtcacaggataaaatatttcagcgattacagacaaaagtctggaaaaagataaaagcaatataaagtggaagcagaagagagatgagattttcgtctctctttttcttttttgcttagaaaaactgtaaatgagaaaacttctcaaataataaaaatctaattgactggataaaagacatcttgtatacttacgaagttagttaaactaacacaagttagtggaaaataactaggagtggttacatgaaattaaaatatataaattgtttacttgcagtctgtctctgtgtgtcggctttgttggtcggctgcggacagaagacagcagagaaatccgaaacagcgtcagaaagttcacagaaccagtcggatgatatacaagaagcatccagggatgtttttgctatggatacctatatgacagtgactgcatatggagaaaatgcagaagtagccgttgatgcagcggaagtagagattgagcgtctggacgcacttttatcgacaggagatgcagacagcgaaattgcaaaactaaatgcagatggaaatgcaaagctttccgaagatgcaggctatctggtggaacgtgcgttagaactttatcaggagacagatggtacgtttgacattgcgatttatccggtgatggaagcatggggattcccgacacagaatttccgggttccttcacaggaggcattggatcaacttcttccacttactgatgcgggaaacatttcttatgacaaagcaacgaaaaagatctcttttggcgcagaaggaatgaaaattgatctcggaggaattgcaaaaggatatacatcatccagaattatggacatttacaaagaaaatggaatctcaagcggattagtgaatcttggcggaaatgtgcaggcacttggaacaaagacagatggaacgaaatggaagattgcagtgcagagcccggatgatacagaagactatctggggattctgagtgttcaggacaaggcagttattacttcggggggatacgaaagatattttgaacaagatggtgtgacgtatcatcatatcattgacccaaagactggatacccggcagaaagtggacttgtctctgtaacaattgtaagtaaggatggaacactggcagatggactgtctacttcactttttattatgggagaagagaaagcggcagatttctggagaaaacataaggatgattttgatgcaatccttatgagtgataacgggacgctatatgtaacagaaggattggaaaatgatttttcaacggagagaacggttgagattatccgatagaaagtataagacaaaatcagagatgagaggacaaaaatggatttaaaagagacaggaaagaagctgaaaccatttgcaccggtactttcggtagcagttgtggcatcctgtgtagcaggctccctgggtggatatcagccaccggtttatgcagcgcaggagcaaacggattttgtaaaagaagagactacaaagtcagaagagcaggcacaagtggcaaaaggttcttttgatctgacagatggtgtttataaaggaaccggaacaggttatgcgggagatatcacagttgccgtccaaattaaagataaacagattgttgcaatcgatattctgagttcttcggatgatgcggcattttttaaacgtgcacaggcagtgattgacaagatcatagaaggtcagacactggatgtcgatacggtatccggtgcaacctatagttcccggggaatcatcagtgcggtgaagaatgcactgaccggagagaaagacagcggaacaacaggtcagtcacagtctggtagcggcgcggcagctggaagttccacttctgtccaagcagtggaagacccatcagcatataaggatggaacctattacggaacaggaaccggatttggcggaacactgaaagtaaaagttgagattagtggcggaaagatcacttcaattcagattatggagaatcaggacggaagcgaatacatttctaaggcatctgctctgatcaatacgatcatacagaatcagagtaccaatgtagatactgtgtcgggggcaacttatagttcggtcggaatcatccaggcagttcggaatgcgctgagtcaggcggcagtaagtacaagtgggacaacgacttccggagaagctgggaatgcaggaaatagtggaaaccagaatcaggacacatccgccgcaacaggaaacttcccgtataaagaaggaatttattacggaacagcagaaggctacagcggagatgtctcggtggcggttgtgattcaggaaaaatcaatcaaagcaattctgatcacagagacttcggacgatgaggcattcttccagcgcgcaatgggagttgtgaaaaatgtacttaagacgcagagtacggaagtcgatactgtgtcaggtgcaacctacagttcaaaaggaattctcggggcaatccaaaatgcattaaagcaggcagaaaaagtaacaaatggggaaaccatcgaggagaaggcagatacaacgcagctggaagaggcaatcaagacagcagaagcactggtgcaagaagaatatacagaagccagttggtctgtactggcggttcgtcttcaggacgcaaaagaaatgctcgaaacagcaggacagacttcggtgaaacaggagacggtagacaaagcggtggagaacctgaaccttgcagttgcacagcttgagaaaaagaagtcagatcaagaggaagaagtgaagacaaaatacatcgatggaacttatgaggtgagtgtaccatgcaagccggatgaggatgaagattttacagagtatcagctttctatgaaggtgacaatacgaaatgacaaaattgtatccattactgacgtgtcaggagatggggatgcagcgaatgacagctatatcaagaaggcggcaaatggaacttcaagcaaaaaaggtgtcgtttcccagattattaccaaaggaatgccggaagaaattgatacggtatccagagcaacctgttcttcgaatgcgattattgacggatgcaaaaaggcactggaaatggctttaagaccagaagagacggaggcgcagtaggatgaaagagtttatcgtaagactgtttagtctgctggcaatcgtcggtgtccttttcggatataatgaagtgttggatgtccgtgcgaaggatgaggaaatcgcaaaactgaatgcacagttggaggtacagtcatctggtgccggcagtgattctgagtcagggagtgattcaggagatggagcaggatacaaggatggaacctataccggagaagcggatggatttggcggaacggttgcggtagaagttactgtaaaagatggaaagatcgaagcggtagaagtgacttccgccgagaaggaagacagtgcatatcttgcaatggcggaagatatcattccaaagatcatagaggcgcagagtgcagaagttgatacgatcagcggcgcaacgttcagttcgacaggaattaaaaatgcagcagaacaggcattagaacaggcggtaaagtagtttgaagaagttgaatatacataatttaaaagcaaaagaaattaaaaaattgcatacttggcttcgtgccttgattcagattctctattttctgtttctgccatctgtgtatacagcggcatttgccggcgtgaaatacattttcacacagataggagcaggcgaggcaatcgggctgacctcttttgtaacggtgcttatagttctttgtgcgtatacgattcttttcggaagattcttctgtggattcgcgtgtgcattcggaagtctgggagatggaattcatgcattttatctctggtgctttaagaagagaaagaaaaagccggtgctactttcagaaaagatcacagagaagttaagctatttgaaatatctggtgttgaccgtaatcgcagtactttgttttgcgggagtatacggaaaggcaaaagggacaagcccgtgggatgttttttctatgctgcatgcaggaaatcttcacttgcagggatatttgccgggagtgatattactacttcttattattgtggggatgtgtctggaagaaagatttttctgtcggaatctgtgtccgatgggagcagtattctcattacttccggtgcttccgttctttgcattgcaccgcgacagagaaaattgcatcaaaggctgcagcggatgcacgaagaaatgtccatccgggatcggactcccggaagacggatcactcaaagtcgagggagattgtttccaatgccagaaatgtattgatacttgtccaaagaagcatatccatacaggaatcaaaggtctgaagggaaatgaattttggtttacgattcttcgggcaattctgttacttgtaattatgatctgggcaggagtgtaatagatgaagaaaaaagatctgtttttaggaggcggaatcctctttgcggcatgtgtactgtttcttgtgatgaatctgatgcagtatgtacaggcaaaggaaagcggacaaaaagaaaatcaggaaaaacaagttgtgatcaaggtggacggagaagtttacggaagatattctttggatgaagatcaggtgatcgaagtgcaggaaggggatttttacaaccgtgtccggattgaggatggaaaagcttatatggaagaggctgactgtccggatggatattgcgaagagcaggggaagatcaataaccggtcacagacaattgtctgtctgcctcacaagctggttgtggaaatagaagaggttgagaattctgatgattctcaaaatgaaaaggaacatctaccggatacaatttctaaataaatcaattgttcgactgtaaaggagaatgtatgaatagaaataaaaaacttgcgaatatggcaatgcttgttgcgctggcaatgatttttagttatgtggaaagcctgatcccaattaattttggagtgccggggatgaagcttggagtggctaatctggtcactgtaacaggtctctattttctggaaattccggaggtactggcggtatctgtactgcgtgtgcttctgacaggatttctttttggaaatggaatgtcgattatttacagtctggcaggggcggttgtcagccttcttgccatggtacttgtaaagaagatggatggaatttctattgtaggagtaagtatcactggcggcgtctttcataatataggacagattcttgttgcgatggcagtggtggagaatctgaaactgatttattatctgccggttcttcttgtggcaggaacagtgacagggttcgtgattggaattgtcgcaggaaagattttaccggttgtgaagaaagaagctgtaaggacagtatagatgtaaaaattttttggggttataggttagtaaaagctaacttgataatatattccatgcggaagcaggaaagcagaactgcgacaggcaggatctgtatgtaattattttagttaaaaaggaggtttctatgaaaaacaaagaaatgaaagtaaaggcaatgtccatggcagtggcaatgtctatggtagtaggactttgcccgtcaaccatctttgcggcaacaggaagtcagactgcgaaggatggaacttatacaaagacagcccacgtggcaagaactgcagaggatgacgaaaatgaagacgaatggaatgagtatgacgttgaagtcagcctgaaggtggaggatggcaagttttcagccatcactgtgactccaggggaaggatataacgcggagagtgattcctattttgcaaaagctgtttcaaaatcgaaaggaatccagaaaatgcttgtgggaaaggctgcaacagaagatacaattaatggttgggattctgttagtggtgcaacacgtacatcaaaggcagtgaaagaagctgcacttgctgcaatcaagtcagcaaacgaagcagtaacagttgacacaacaaaactggaagctgcaatcacagccgctgaagcactgaaagaagctgattacacagcagacagttggagtgcaatgcagacgaagctaacagcagccaaagctgccctgacagcaaaagaatctcagagcgcggtagacacagcagcagacgagctgaatgcagcagtgaaggcattgaaaaaggcagaagttgcgaaagaaacgtatgtgttgatgaatattccatattctgaattttatgcagctgatcaggtagcaggagcagacagtgtatcctccgctacaaaagcgaaaacaagatcaacacttgcagctggatcttatcatgtaaacaatgatggaacagatattacaggtattacatatccggttaagattagtgatgcatcagtactgaaaaactatacacagatcacagatgacagcaagctttctattacagtgaatatgaaaggaaaagagacaacaacagaatataatggaaaagctgcgttattcgagagcgcaagctattcttactatattttaagtgagactccttcctattataaggaagcaacagtaaatgcagatggttcactcagctttagtgaagtgaaaggtgcaactgcacagaagttgagtgatgcatcaattgatttcacaacagacacaaagtatggagattatgaattagatgtaaatggactcccaaaaacagttaatacagtatatggagttgtgatcagcacaaaagaaggagacaactacggacttcgtcatcttgaaaatatctggaaaaagacagaactggcatggagtaccggatttgtgacaacatctcatggaaatacactgaactcaaaagattatgaaaagatgatgggccagacgatcaataaaatcacatattacacagataatggaatctatgagattgatgcagatcagtatgtgccaattaaattcaatggaactgtcgcagcagagaatgcagatgttaaaagtggaaaagtaaatgtaactgtagaaggccttcctggtgattatcaggcagaatatacagttaaaggtcttgaggatgttcaagtaaaagaaggaatacttacctataagacaaagggcgctgagataggaaaatatactctgaaagtatctgataaatctggaaaatatgcagatcttaagacagattttgaattaacaacagaagctgtaccggttgtatttaatagtgaaagtgcagcacttgtagcggcagaaggatatgcagcagatgatgtaacttcttatgtaaagaagatcaaatccgtaacagttgacggaacagagtatgcagcaacaggaaaacgtgcagtgaagatcattaaagaagatggaacaattgatacaactgcagctccgtttaagaatgcagaaaatggacaggaatttaagatcacagtgaaagcaacaggctatgcaaaggattgtgaatttacttatactgtagcccaggagagtgagtatacttacgcatatgtaggacttagctgggcagagtactgggctgctgaaaatgtgcaggcagcaggagatacatcttcttcagatgcaaaggattcaaaaggagagtctgacaagggtgcattcgatactgtaacaagagctacagtaaatcatggacttcacagaggttctttccagtgcaacgcagtaatcaaggcggaaaatggaaaagagtatgcagtagagtactggacagatggaactactgcagttctgacagacggaagcaagattacatttaacagaggagagatcacagaggaatccggtgcaacaacaaagatgacagagtatgatgtactcggactgaaatatgtgccggtgaaagtaaaaacatctgatctggatgcactgaaagcaagctatcgtgtgatcgaaaacggaagtgaacttgcaggaggatattcagaaaagaatctggtaagctatacaggactggttgctaatgtaacagagaatacaaacggtctgaaaacagcaacaaagaatgagaatggatctttcagtttctctgcaagagtgaataatggatcagagtccggaatcaaagatcaggcactcaagacagcaccaacagcagagaaagcagggctgacagtaaaagaagcaagtggatcttatggagaattcttaagagttgatctgacaggaaattatggtgatcttggatcaaatctccagactgttacatggacttactatggagatgacagcacatatacaaatgcagaagctacttatggaacaaaatttgcagcagataactggatgcacaaagcaatgggaatccagcttggactgacagattctcttcgttgtacacttccggaaggaacggatggaacaggatattggaccattacactgacagcacttggatataacgacgtgacatacaaattccaggcgacagaggagaacattgtaaaagcatctgaggataaaacaatcacaacaacagagcttgaggcagctattgcaaaagcagaagccctgaaagaagctgattacacagcggaaagctgggcatctatgcagatggaacttcaggaagcaaaagatgaattgaaaaatccaaaaactcaggcaactgtagacgaggcagtaagccacctcaacgcagctgttgaagcacttgttaagatagaagagccggcagcagttgatacttcttcccttgagaaagtaatcagtgatgcggcagctctgaaagaagctgattacacagttgacagctggaaggcattgcagagtgcactgacagacgctaagagcgcattaaatgcaaaagaaagccaggaaaaagttgataaagcaacagatgcgttaaatgcagcaatcaaagcacttgtaaagaatggaaaccaggcgggaagtcagaatggaagtgcaactccgactgttacaaagaaggcaggaacaactacggatggatcagcttccaaaggaacaagtggatcaaaagccgcaaagacaggtgatccggcaaatgttcttggcttattaggacttgcattctcctcactcggagcaggagttggcggatttgcatggaagagaaaaagaaaataaagacaagaaaattgagaaaattttcaacaatttcgcgaaaaagattaaaatagtgcattgacactatcgctttaaagtgataaactcctagcaaatggaataacgctttaaaccgatgaagcggagatcaaagtaattatgcgcgcacagagagtccgggaagctgagagccggatcgagatgcaggttgccaaatggaccgctgagggcacagtcaaaggatttgagaatccgagtattctgtgacgtgaggtatacgtcagttgccggagatatgttaatatcttacagagcgcatgggagtgtacccgtgaatcaaggtggcaccgcggaaaagatttagatttaccgtccttgacagaataggaatattctgtcagggactttttttctaccataaacatatatttcctatcgagataaaagagaaattccataagaaattgtaactgttcagagccaagcaaaatttcataaaacaggtgtaaaatgcttgcatttttaagactgtttttgaaattttatttggcggatacgccacaccgacgaaatgcgtagcattttggaggttggctctgaacagttacaagaaattcattttgcagcataacttcaaggaggaatatacatggacaagacattagaacaaatcagatcctacgctgaacaaggcagatacaagcgagttccgatcagcaaagaactgtatgcagatgcatttacgccgattagtgtgatgcggacgctgcgggcggcaagcaagcattgctatctgctagaaagtgcggaggacagacagcagtggggaagatattccttccttggatatgcaccaatgatggagatcacttgtaccgatgggcgtgtgatcatcagcgaagggcatgaagatgaggataagaccagacgggaagttttaaccgaccatccgggaaaggttctaagagaaattctcgaagcatataaaagtccggttgttccgggacttcctccatttaccggagggcttgtcggatatttttcttatgactacatcaaatatgcagaaccgacattaaagccagtcctggaagagaagaatgagactacaggaaagacagcagcaaaaacggcagtaagagatttccgggatgcggacttgatgttatttgaccgtgtcatcgtatttgacaattacagacagaagctgatcctgattacaggcgtgaagctggaaggtgatctggaagaaaattatacgaacgcgaagcaggaattagaagagatggaacgattgatccgaagcggggcgcaggcagatttccgaccacttgttttagaagaagagttccatccgggagtggataaagaagattattgcaagatggttgagaaagctaaggaatacatttatgaaggtgatattttccaggtcgttttatccaatccgctgacagcgaaggcaaaaggaagtctttttgatacctaccgggtgcttcgaacctcgaatccatctccgtatatgttctacttttcaagtgatgatattgaggtggcaggggcttcaccggaaacgctggcgaagttagaaaacggacaggtgtgcacttttcctcttgccggtacaaggaagcgaggagtgaccgaagaggaagatcaggaattggagaaagagctacttgcagacgagaaagagcttgcagagcacaacatgcttgtagatcttgggcgaaatgatgtcggcaagatcagccagccgggaacagttaaagttgataaatatatggaaatccagagatattcccatgtaatgcatattggttccacagtaacaggcaagattcggaaagataaagatgcactggacgtagtagatgcgattctttcggcaggaacgctttccggagcaccgaagatccgcgcatgtgagattatcgcagaacttgaacaggagaaaagaggcatctacggaggggcagtcggctatctcgattttgcaggaaatgtagatacatgcatttccatccgtcttgcttataagaaaaatggatacattcgtgtacagtcaggagccggaatcgtagcagacagtatcccggaaaatgaattccaggagtgtttaaataaggcaggagcagtacttcaggctgtggaaactgcgaaaggaggattggaatgatactattacttgacaattatgacagctttacatataacctgtatcagtttatcgcaggagtagaatcagaaataagcggcatacaaaaagatcagattgattcaaaagtaaaggtcgttcgaaatgatcaaatcacaccggaaaagattctggaacttgcgcccgaggcgctggtaatctcaccggggccgggaaaaccttctgatgccggaatctgtatcgaagcaattcagaagctgaaaggaaagattccaatgctcggggtatgtctcggacatcaggcaatggcggaagcattcggagcaacggtaggacacgccggacagctgatgcacgggaagacttcaaagctgaaagatgtaaagacagacagtgtcctgtttcagaatctgacatttccaatccaggtggcaagatatcattcgcttgcagtaaaagaagagacactgccggaagaactggttgtgacagcgcgaagcgaagataacgagattatggcgatggaacacagagaatatccgatctttgggttacagtttcatccggaatccgtgatgacaccgcagggacttcagatgatagagaactttattaactatgcgaaatcgttgaaggagaattaagaaatgatcaaagaagcaattataaaattatcaaagaaagaaaatctcacctatacagaagcagaagaagtaatgaatgagattatggaaggaaaggcatcggatgttcagaagtcagcatatctgacagcactttccatgaaaggtgagacaatcgatgagatcacagcatcagcagcgggaatgcgtgcacactgcatcaagcttttgcatgacatggatgtgctggaaatcgtaggaacagggggagacggagcaaattcatttaacatttcaacaacatcctcccttgtgattgcggcagcaggaatcccggtcgcaaagcatggtaaccgtgcagcatcttctaagtccggtgcggcagatgtacttgaagcacttggagtgaagatcgatgtcgcaccggagcgcagcacacagcttctcaaagacattcaaatctgtttcttatttgcacagaattatcatattgcaatgaaatatgtcggaccgatccgtaaagaacttggtatccgtaccgtattcaatattcttgggccactgtctaatccggcaggagcgaacatggaactgatgggagtttatgatgaaagtctggtagagccacttgcaagagtcatggcgaatctaggagtcgttcgcggaatggtcgtttacggacaggataagttagatgagatttccatgtgtgcaccgactacagtctgtgagattaaagacggaacatttacaagctatgagatcacaccggagcagtttggttatgagagatgcgaaaaaggtgcactgacaggaggaacacctcaggaaaacgcacagatcacattggatatcatttcaggaaaagagcagggagcaaagagaaatgcagtttgcctgaatgcaggagcagcaatctatcttgcaggaaaagcagattcaatcgaagcaggtgtaagaaaagcagaacagatcattgacgaaggacttgcactgaagaagctggagcagtttaaagaagaaagtaataaataaaaagtctgatccacggctatgcaggggagaatggaagaagcaacttgaaagaaaaagaggaacaaatagtatgaatatactcgagaaaattaccgagcgcacgaaagagcggatcgaagaagaaaagaaaatagttccattagaagaggttcgaagacaggcggaagaaaaaggaattaaagatcaaatccctgcattcgaacaggcacttcgggcagacggattatcctttatctgcgaggcaaagaaagcttctccttccaaaggattaatcacaccggattttccatatgttgagatcgccagagaatatgaagcaggcggcgcggcagcaatctcctgtctgacagaaccgttttggttccggggcagtgatgcgtatctgaaagaaatcgtgcaaaatgtatccattccggtactcagaaaagatttcacctgtgatgaatacatgatctatcaggcgaaagcaatgggagcctcggcagtacttctgatctgttcggtattagaagatggcaggttaaaagcgtatcatcagctggcagacgaactcggactatctgctttggtagaaacacataacgaagaagaaatcttaagagcacagaagatcggtgcaaagattatcggtgtaaataaccggaatctgaaagatttcacagtggatatcaagaatagcattcggttaagagaaatggtcagttcggaaacagttttcgtatctgagagcggtatccgcggagtggaagatatgaaagcactttatgaaaatggaaccgatgcggtactgatcggagaacttctgatgagaaaatctgatcggaaagcagcactgatggagttgaagcagcagacaggaaggcagctagatatgaattagcggaagatatagtatgagacaagaaaaaatgaacatgcctaagattaagatctgcggattaagccgcccggaagatattacctatataaatgaagcaaaaccggattattgcggatttatcatcgatgtgccaaagagccggagaaatgtatccatttcgaaagttcgtgaactggttcaaaatattgaatcgcagatttgcccggtcggagtatttgtcaataaagactgcggtgaggtcgcacaattattaaatgaaggaaccattcagattgctcagcttcacgggcaggaagatgaggcatatataaagaagttgaaaagcctgacagaccatccggtgatgaaagcattttcgattcaggagaaaaaagatcttgatgcggcggcagcgagcagtgcagatctgattcttctcgatcacggaaaaggcggaaccggcaagacatttgattggagtcttttggaaggctggacaaagcggccgtatttcctcgcaggaggactgaatccggagaacataccggaggcaatacagcgaatacacccttggggaattgacctgagcagtgcagtggagacagatggaaagaaagatcgtgagaaaattcttaaagctgtgaaaactgtgagaaattttgaaagcagtaaacattttttagaaaataaaagagtatacaggtgaatgaataaatttaccaaaacaatagaaacaagaaagaaggagagacaaccatgacaaaaggaagatacggaatccatggtggacagtacattccggagacactgatgaatgcagtgatcgaattggaaaaggcgtacaactactataaaaatgacaaagaatttaatgacgaactgaatacattattaaatgaatatgcaggcagaccgtctcttttatactatgcagcacgtatgacagaagatcttggcggggcgaaaatttatctgaaacgagaagatctcaatcacacaggtgcccataagatcaacaacgtgttaggtcaggttcttcttgcaaagaagatgggaaagacaagagtgatcgctgagaccggtgcaggacagcatggggttgcaacagcgacagcagcggctctgatgggaatggaatgtgaagttttcatgggaaaagaagatacagagcgtcaggcactgaatgtatacagaatgcgtcttctcggagcacaggtacacgcggttacaagtggaactggtactttaaaagatgctgtttcggagacgatgcgtgagtggacaagaagaattgatgacacacattatgtactcggatcctgtatgggaccgcatccatttccgcagatcgtgcgtgattttcaggcagttatatctaaagagatcaaggagcagatccttgaaaaagaaggaaaactcccggatgcagtgcttgcctgtgtcggcggtggatccaatgcgatcggtgcattttataatttcattgaagatgaaggcgtgcgcctgatcggatgcgaggcggcaggacgcggcgtgaatacagcagagacagctgcaacgatcgcgatcggtaagcttggaatcttccacggaatgaaatcttatttctgtcaggatgagtacggacagatcgcaccggtttactcaatctcagccggactggattatccgggaatcggaccggagcatgcagacctttatgataagggaagagcagaatatgtagcggtcacagatgatgaggcagtcgatgcatttgagtacctttctaaattagaaggaatcattccggcaatcgagagtgcacatgcagttgcatatgcaagaaagcttgcgccgacaatgggaaaagaccagattattgtaattaatatttcaggacgcggagataaggactgcgcagcaattgcacgttacagaggggaggatcttcatgagtagaatacaggaagcatttaaagggaagaaagcatttataccatttgtcacatgtggtgacccggatcttgagacgacgaaacagattgtctatgagatggagaaagcaggggcggcgttgatcgagcttggaatcccattttccgatccgacagcagaaggaccggtcattcagggcgcaaatctgcgtgcgctgacaggaggcgtgacgacagataagatcttcgatatggtaaaagaaatccgtcagaatacacagattccacttgtttttatgacatatgcaaatgttgtgttctcttacggaacagaaagatttcttgagaaagcgaaaaatgtcggaatggatggtctgattcttccggatgttccatttgaagagaaagaagaatttgacatcgtgtgcaaaaagtacggaatcgatctgatctcattgattgcaccgacttctcatgaccgaatccggatgattgcaaaagaagcatcgggattcgtatattgtgtttcctcacttggtgtaacaggaacaagatccgcgatcacgacggatatcggagcaatggtgaagcttgtaaaagaggaaaatgatattccatgtgcggtcggattcggaatctccactccagagcaggcggcgaagatgtgtcagagcgcagacggtgcgatcgttggaagtgcaatcgttaagttgtgtgagaaatacggaaaagactgcgtgccgtatgttgcagaatatgtaaagagcatggttgaagcttgtaaataagtgaaaaggatctgggattcgaaatccgagtcttcttttgataataataggaaaatacctcttttgataaggagccagatgtggtatcatagatattagatttgttgcttgatctatgatacgaatccgaaaggagactacgaatgaagaatcgaaaacagcctttattcaaaagctttggctatgcctttgaaggaatctggacagggatttcaaaagagaggaatatgaagattcattgccttgcagtgattcttgtaacagcagttggaacctttgtaggtttaacaccgatggaatggtgtatctgtcttctcctttttggaatggtgatctcactggaacttgtgaatacggcagtggaagctgttgtcgatcttgtgacagaagagagaaagccacttgctaagatcgcgaaggatacggcagctggtgcagtgctttttacggcaatcatggctgtgatcatagggtgtatcatatttatacctcatttcattgcactactgtaatgtaaagaaaagcaaccagaaaggaaaacaaagagatggatgagaataaagtaattgtcagtacagagatgaagcaggcattggtgaatctgcgaaatctcgaagagatttatgtgatcatgtcaggtgtgacgaagatgccgtttgtcctctgtgatgaagagacatttgatgacgaggttctggtttattatcaggaagagtctgcaaaggaaaaggcaaagacgcttgcagaagatcgttatcatgtaggcattgccaagattgaaaagaatgtcagacttggattttttacaaacctgtatacaatgggcgtgaatgcactggcagtgaatgttggtacagaggaggagatcagggttcagctggaacagcttgtagttcgtaagaataaggaagaactgcctgacggaaagaaactgatcgagaatccggagcttcatctgacagcaatgtatctgatgcaggagatgcaccgcaatatcggaccggagatgccggagaatgtgaaggaacttcaggaagagatgatggcgcattataagaaaggaacctttatcgtaggagttcaggaagataatcaggttccacttctgagacagccggacggaagtctgtatcagccgatctttacagatatgatagaatttaccagatttgcacagggcaagaagatgaagacagcagcaatcccggcggataagattccggagatactgatcccggatgcaaagggagttgcaatcaatccatttggtgtgaatgtacgtctggatattacaaaagcaaataagcaaaagccagaagcgtaaaatgaagagaagttaatttgaatcaaaagaaaaactttaatttactaaaataatcactaagtaacatattcaacaaaaaaacaggataaatattgttgaatattacagattgactgttggaagtgagtatggttatactatacgtggttaaaagagaaaagcgcacgatagagtgttactggtaaagcaggcataaactatccttaataagttcaccagataaggtggatttcgttattgaggattagtttatgctttttttgttgcgctaactctataagaaatgatactaggaggattacagatgaaagacaagatttttggagtattgcagagaatcggaagaagttttatgcttccaatcgcaattcttccggtagcaggacttctgcttggagtaggaagttcatttacaaatgcaacgatgattgagacatatcatcttcaggcaattttaggcgaggggacaattttgaattccctgctcacaattatgagcaaagcgggaagtattatttttgataacctgccgatcatttttgctgtcggtgtagcaatcggtatggcgaagaaagagaaggaagttgcggcacttgcggcaatgatctctttctttgtaatgaatgcaacaatgaatgccatgcttctgatccgtggagatcttcttgcagacggaacgcttggagccggagttctggaaggaactgtgacaagtgtctgcggaatccagacattacagatgggtgtatttggcggtattatcgttggacttggagtagcagcacttcataataagttttacaaaattcagcttccgaatgcactgtcattcttcagtggatcaagatttgttccgattatttcaacattgacttatgtggctgtcggaatcgtactctattttgtatggccaaccgttcagaatggaatctatgcacttggcggacttgtaacaggaacaggttatattggaacattgatctttggtattattaagagagcgttgattccatttggacttcaccatgtattctatcttccattttggcagaccgcggttggaggaacaatggaagttgcgggacagctggtacagggcggtcagaacatcttctttgcgcagcttgcagatccgtccacagtacatttcagtgcggatgcgacaagatatttttccggtgaatttatcttcatgatctttggtcttccgggtgcggcacttgcaatgtatcagtgtgcaaaaccggagaagaagaaacaggcaggcggacttctgctttctgcagcacttgcatgtatgatgaccggaatcacagagccactggaattctcattcctgtttgtagcaccgatcctttttgtggtacaggtgatccttgccggatcagcttatatgatcgcacatatgttaaatattgcagtaggacttacattttccggtggatttattgatctgttccttttcggtatccttcagggaaatgctaagacaagctggatcagaatcatcccggttggaattatttatttcttcttatattatatcatcttccgtactttgattctgaagctgaatctgaagacaccgggaagagaagatgatgatgcggaaacgaagctgtatacaaaagctgattataaagcaaaagtagatggaaatgatgcagattctgaaaatgaaatgacaccggaagatcagaagagcgcactgatcacaagaggacttggtggaaagaaaaacatttctgatgtagactgctgtgcgacaagacttcgttgtacggtagtaaagccggaactggtaaatgaagatgtcttaagaatgacatccccatccggaatcgtaagaaaaggacagggaattcaggtaatctacggaccggctgtttctgtgattaaatccaatctggaagattatctggagaaagctccggatgtggaatatcttccggaagaaaacgaaaacagcgcagaagaaacgaataaatgtgcagaaccaaaagatgaagcgaagaaagatgagaacaaaactgttacagccggaactgtaaagaaagagctttgctctccattcacaggagtggcagcaccgatcgaagaagcgtgtgacgaagcatttgcagggaaaatgatgggagacggttatctggttcgcccggaagagggaatggcttatgcgccggaagatgcaactgtatcttttatcttcccatcaaaacatgcagttggtctgactagtgatgacggaaccgaatatctgcttcacattggtgtggatactgtaaatctggatggaaaaggattcgaaacttttgtaaatgacggagaccgagtaaaaaagggtgacaaactgataggttttgatataaaatatatccaagagcatgcaaaatccgatgaatgtatggttgtatttacaagccttcaggaaggtgaagagatcagaatgtctaagagcggaaaagtagagaagcttgagaagacagcagaaatcgtaagcttgaattaagagaaagaaagagaggctccggggggatgtatcgagtcattaaagttctgaataataatgggattcttgtatatcatgttgagacagggaaggagatgatccttctcggaaacggtgtgggatttggaaagaagcctacagaacagatcgagaaacttcccggagccaaagtatattcccttgtcacaagaaggaagcaggagtctgttctgaaaacggtcaatggaatccgcccggagtttattgaggcaacaggaaagatcattgaagaagcagagaacgtgtttcagaagatcaatcatgagatgctgcttccgttggcagatcatattgcgcttgcagcgaagagagcgaaggagaaccgtcagcttctgaatccatttacaccggatatccgtgtgttgtttggagaggagtatcaagtggccctgaaagggcgggaaattatacagcagctgacaggatatgaaatctcagaggatgaagtcggattcattacgctacatatccatgcaggtctttcagatgaggcagtatcccagacgctggatgcgaccaggattgtaaatgaagggattgccatgattgaacaggaattcgatcagaagctggagagcggctcacttggatgtacacgtctgatgagtcatatgtattatatgattctgagaacccgtaagggtgaagggacgaacgcagactttaatgatttcatttttcagaattacccaaggaccggagaggcggcgaagagagtgtgtgactatatgtccagacaactgaaacaaccggtcgcaaaagaagagatcggatttcttgcaatccatatccagagggttgtctcgccggatacggtatgaccgtgtgctcttgaaatactgtatactatgatatatagtagtggataagagcgaaaggggaatccgcagaatgtataagattctaatcatagaagatgaccttgtgatggcaggggcaattaaaaaagagatggaagcgtggggaaatgaagcacgttatgtggaagattttgcaaaggttcttgagacatttgcagagtatggtccacatctggtgcttttggatatcacgcttcctttttataatggataccactggtgcagcgagatccgtaagatatcgagcgtgccggtgatctttatctcttcagcagcggataatatgaatattatcatggcgatgaatatgggcggagatgactttgtggcaaaaccgtttgacttaagtgtactgacagcgaagattcaggctctgctaaggagaacatatgatctatcaggaaaagtaccgatgctggaacatagaggagcaatcctgaacctctatgatacaacaatgacttataatggagaaaaaattgagttgacaaagaatgaatttcgtatcttgcagacattgatggagaataaaggacgcgtggtcagcagagacacgctaatgacaaagctgtgggagacagataattatatcgaagagaatacattgacagtcaatgtcggaagacttcggaaaaagctggaaaaagcgggaatggaaggctttatcaagacgaaagtcggcggtggatatatcatcgagaaggagtaaaaatgtttttacaatatttgaaaagaattcgctttgtgcttctgtggagtttgctgtgtgcgggaatcttttttctgatttttgtgttggaagagattaatctgaaggcagcggtttatccgacagtgttgtgtctggcatttggattactttttcttctctgtggatatttgcggtataagaaaaccgggcagaagctggaacatttgctgcaaggagaaggaccttatgaggatttacttccggtggcacaagatgggattgagtcaggatatcaggaactgatcaggaaagaagaacaacagcaaagaaaagaacatgccagatgggagaagtccggtcaggacatggaggactattatgcaacctgggtgcatcagatcaaggcaccgattgctgtgatgaatgtattactccagcaggaagataccgagacgaatcagaatctgaaagctgaactgttccgggtggagcagtatgtggagatggcacttgggtatgtgcgtcttgacagtggcacgaaggatctggtaatcgcacagtatcctttggatgaaattgtaagaaaatcgatccgtaaatatgcaggacagtttattcgaaggagaatccgtctgatctatgaagggacagatcagattgttttgacggatgagaaatggctttcatttatcattgaacagctgttgtccaatgcggtgaaatatacactgaaaggaactgtgacgattattgtcagtgaagaaaagaaactgacagttacagataccggaatgggaattgcaccggaagatctgccgagaatctttgaaaaaggatatacgggatataatggaagaatggaacggaaatcaacgggaattggtctgtatctgagtcagatggcggcaaagaaacttgggcatcagatcacggtagtgtcgaagctgggggaaggcagcagttttacaatagatctggcagagtatccgttgagagcagagtaaatcactaaatcacacagagagaaacaagtgacaaatttgtcacatcagacagctggaatgtcacagaaatcaatgtcggcattctggctgtattgctatactgaggatgttgaaagaaagaagaggaggtcgtaagaaatgacagttttggaagtagaaaatttgaaaaaaatataccgtccacgttttggcggtaatcaggtacaggcactctctaaggtgacattctcagtagaagagggcgaatatgtagcaatcatgggagagagtggctcggggaagacgacattactgaacatgctggcagcattggataaaccaactgaaggggaagtttatctggatggaaaaccgttatcagcaatccgtgagaaggatctgtccaagttcaggagagatcatcttgggtttgtatttcaggatttcaatcttttggatacatttaatctaaaggacaatatcttactgccattggtactgcagggagttgattacaggaaaatgaatgtcaggatgatgccaatcgtgaaagaacttggaattgcaggacttctggagaagtatccgtatgaggtgtcaggaggacagaagcagcgtgcagcagtggcgagagcgctgatcacagatccgagactgatcctggcggatgagccgaccggggcactcgattcgaaatcaacggatgaattgctcggggtatttgagcggatcaatcagtcgggacagacgatccttatggtaacacattctgtcaaagcagcgagcaaggccgggagagtgttatttattaaagacggagaagttttccaccaggtatataaaggcgcacagacagatgaacagttctatcagaatatctcagcgacactgacaatgcttgcgacaggtggtgagagacaatgaaaagtggactttatctgaaactttccgttaatggaattaagaaaaataagaagctgtatcttccttatctgatcacttgtatctgtatggttatgatgttctatctgatcgattatcttgcagtgagtccgcagtttgccaagatcaaaggtggggatactatgcagatgatccttggatttggttctggtgtgatctcaatcttttctctgatccttctgtattacacaaattcatttctgatccgcagacgacagagagagtttgggttgtatcacatccttggaatgggaaaaattgaccttgtaaaaatcatggttcttgagaatctgatcatcagtgttctgacgattgcaggaggaatcgtgggaggaatcctgttctctaaattaggggaacttctggcagcgaagatacttggaagtaatgccggactttctatgaaaatcagtgttcaggcacttgtggctacggcactgttattcctggtcatttttgcattaatcatgcttcggatgatcgtgtccgtctatcggttaaaacctgtagaacttttaaaaagtgaaaagacaggagagaaacctccgaaggcaaactggatctttgcagtactcgggttgcttctgcttggtgtggcttattatttatccctgacaatcaaagatccgcttgtagcgatgatctggtttatggttgccgtcgtgctggtaatccttgcaacgtatctgttatttattgccggctcggtcacattttgtaaaataatgcagaaaaagaaaggatattattataaaacaaatcattttatttcactttcatccatgatttaccgtatgaaacgaaatggggcaggattagcgtctatttgtattctgtccacaatggttctggttatggtatcttctacaaccagcctgtatctgagtatggaacatggcttgaatcttcgatatccgaaatctgtccagattgagatgtacacgaaaccggagcagacggaagaaatgaaagagaatcagaatggacagattatagagcttgtacagaaggttttgaaagaacataaccagaccgcggagaatccggagaattaccggatgcttacagtcagtggaattgtttcaaaaaatgaaatctattttaatccggagaatgctccgggagtcaatgaagtgaatacatttgatcatttaaaaatgttttatgctctgccgttggaagcgtataatcggatcatggggacgaatctggagcttgctcccggggaagcgtatctgtatgcgaaagattccgatttcccctatgatcagatcacggtggagaattccgggacatggaggattaaaggacatttggataaaatgatttcaaatggaaataatatggcaaatatgaacagcagcttctatctggtggttcccggactggaagatataaaagctttggaagaaggaaatgtttccgtttacggtgtcaatggttcttatgagaaatggtactacaattttgatctgtcctgtggagatgaagagcagatccagattcaaaacgagattgacaagaaaatcaatgcattggctgaacaggaatcagaggaatcagataccctattttttggagcttctacagacagcagagccgcatcaagggctgattaccaggctttgtacggcggtctgttcttccttggaatccttcttggagtcgtattcattcttggaatggtgctgatcatttattataaacagattacagaaggctatgaggatcaggacagattccagattctgatgaaagtggggatgacacagaaagaagtgcgtcagacgatcaattctcaggtaatgacagtattcttcctgcctcttgtggctgccggaattcatacggcatttgcatttccaatgatagaaaaaatggtgcatctgcttgctttttctgacagaaaattcctgattctggtgacagtgtgctcctatttagtatttgcattattctatatcattgtctatatggtgacttcgaaacagtattacaaaattgttagcggaaaacaggaagaaagtcttttttcttaattcaaagagtgatagaatagaattatcagaaaaaggaggacttgcttatgatggatcacacaattattacaattggaagacagttcggaagtggcggtcatgaagtaggaaacagactggcagagagactgaacattcctctttacgatcataatctgattcgaatggcagcaagagatcttggaatttcgaacgaagatgctggaagagtagatgagacgagacttggaaatgtgttatcaagctattatattggaatgggtgattatactacatttatgctcagtccggaagtggagaaaccattaagtgatcaactttttgacgcacagtcggcaatcatccgcaagcttgcggaacgcggacctggaatcttcgtgggacgctgcgcagattatgttcttggggattattcaaatgttgtgaatacatttatctatgcttataaggatgatagaatcaatcgaatcatggatatctataagctttccgagaaagaggctgtagataagattaagaagattgacagagagagacgcctgtattatgaaggtagaacagaccgtaagtggggaagcattgatgcgaatgcaatcctgctgaatacaagtcttcttggaatcgatggtgcggtagatgcacttgaggcgatttatcataagtgggaaaacagatgacaaaataagcagaaaaaatgaaataattaacaaaaagtaagagggtgtcgtttagtgcgacaccctctttgctacgtctttattctggaatctgtatttatttcatcatgccggcaagaatctgattgacttctttaccgtcagctttgccttttaccttcggcatgagttctttcatgatcttacctttatcctttgctgtaggagcatcgataccaagatctgcaagaacggatgtgatcactgctttgatttcatcttcgctcatcatctttggtgcatattcttcaagaacagcaagacgcttctgagcctcttcaatcagatctgtacgatcttcaggtgtcatatcaattgtttcttttaactgtttgatttcttttaagattacctgtccttcttcctcttctgtcaggtcggcacgtttgtcgatagctttattcttcagagaggagagcagaaaggaaagtgcggcttttcgttctttgtctcctgccttcattgcagcgaccatagcgcttctgatttcatcaattttgctcattttagagtcctccttataatttaatatgcttgaaatagttacaattattgaaaagagcggattgctcttgattcataagataaattttagcagatggtggtttatattgcaagagtgcactctgtttttaaacagcttttaagcagtgtgatgcgttgctggtcgcacatcgtgtgaacagtaacactatcagttttgattattgtaagttattatcaaaaaaacattgtgcattgtatataaatatgttatcctgtttcaaagcatattttctaaaacatctaaattcatataaaggtttcattacaggtagattgcatctgtcaaatcaggaaattcatgcttttaaaatccattatttaaagcagaggttttctgatggagagagaacttctgtgaaaatcacataaggaggtctcttaaatgaaacaaaagagaaagcaattgccggaaaaacaacagccggcagatggaaaactgcttcagtggcaccctgcattttatgcagacttgcagattgaattcagagaagaatcagctgtatcaggccgttatggagatcatagtaaaagcaaacaagaatcggctaaaggagggaaaaagagatatgtgtaatgcgttattagaattaatgaaagatgaattagatgaaaaaagagaagaaggaataagagaaggtataaaagaaggggaatctcttggagaaagcagaatcaatcagctgaatcttaaattatccgaacttagcagaagtgatgagattctcaaggcagcagtggacagggaatatcagaagaagttattgaaggaatttggactttaaagacccaatatccaggggcaggaacttgtcaatatccaagctccattctttgacttccgcagaatgcatcagagtgcactctgttttgtgaaaatatatgaaagaaatgcatgaaaagtataaaaaatcagaaaatttacgaaaagtaaaaatataggttgacaacattgggctaggggagtaaactacgtgacataaaagcaaaggcgctttgagaaacagatctcagagtgccttttcttttaataaaatatggtacctatagatttgccgcaaatagcggcaggtctcaatgacacaaaggtgtgtctcacagcaagaaccgattcagggggggatgattcagggaagctgtgggatgcgcttttttagttttcaggtatgaggaggaagtagtatgacacaagaaattattactcagatttcaagcacagtcggaacagaagtgttcggcatctggttcctgatcggagctgcatttgtattctttatgcaggcaggattcgctatggtagagacaggattcaccagagcaaagaatgccggtaacattatcatgaagaatctgatggatttttgtatcggaacaatcgtgtttatttttcttggttttggattattgcttggagaagatgcacttggcggactgctaggaattccgacacttggaatattcacagattatgcaaactttgactggtctaatttcgtattcaacctggtattctgtgcgacagcagcaacaatcgtatcaggagccatggcagaaagaacaaagtttctttcctattgtatttattccgcaatgatctccgcagttgtgtatccgatcgaagcacactggatctggggcggtggctggctttcacagcttggctttcatgattttgcaggatcttgtgcaatccacatggtaggtggagcaacagcatttatcggagctgcaatggaaggagccagaattggtaaattctcaagagataagaatggaaaagtaacaaaagtccatgcatttccaggacataacctcgtaattggtgctcttggatgtttcatcctctggtttggatggtatggattcaacggtgcggcagcaacaacaggcccacagcttgcatctatctttatgacaacaacaatcgcaccggcaacagcaaccgttgtatgtatgatcttcacatggcttcgttatggaaaaccagatgtgtctatgtgtctgaatgcatccctcgcaggtctggtagcaatcacagcaccttgtgatgtgacagatggattaggagcactgatcattggagcagttgcaggagttctcgtagtatttggcgtttggttctgtgataatgtagtgcatgtagatgacccggttggtgccgtagcagttcattgcttaaatggtatctggggaacaatcgcagttggtctttttgcaacaacaaatgcgccggaaagcacattgaaaggtctgttctacggcggtggattcggacttctcggaacacagcttcttggtgtagtaacagttcttgcttggacagttgtaacaatgacaattatcttcaaagtaattgatatgacaattggacttcgtgtttcagaggaagaagagattgttggtctggattccaaggagcatggtcttgcatcagcatatgcaggattcagcatcatggatattacagaaggtgcaatgaatgaaaatgaaaacacagatcttggtgtagcagattatgacgcagcatctccaatccagagagcagcagctgtacctgtagccggaccggtagatgcagatacaggaatgcataaagtagttattatcgcaaaactttccaagtacgagcgcctgaaagcagcattgaataatcttggtgtaacaggaatgacagtgactcaggttatgggatgtggtatccagaaaggtgccggcgagaaatatcgtggagttgagatggacgtaaccgttcttccaaaggtaaaagtagaagttatcgtaggaaatattccggttgagaaagtcatcgaaacagcatccaagacactgtatacaggacatgtcggtgatggtaagatctttgtatacaacgtgcagaaagtagtaaaagtacgtacaggagaagaagatcttgaagcattgaaagatgtagaataatacttgagtaaaaaaaataatctccgaaaagcagtaaagactgtttttccggagattattttttatgattattgaacgattttttgaataattttttttataaataagattgaaatcttatatactactatatttaataagaagtaacagcgtaaaaaacaacacaggatggtaaaaatgacctaaaaattttttagattatcatataatttgaaaagaaaaatgtgaaaaaaatactattttatgtaaagagagttaaataaatataaaattttcctttaaaaacctaaaaaaatgtgatatagtgtaatacaaacatatgatattgaaattcaggagggaaaattaagaatgaacaattatatgtatctggttccagttgcagctgtcattgctcttctttttgcagcatatcttgcagcaaaggttagcagacaggatgcaggaacagaaagaatgaaggaaattgccggtgcgatcgcagaaggtgcacgtgctttcctgacagcagagtacaagatccttattgtattcgtagtagtactttttgtactgatcggattaggagtaggtaactgggtaacagcagtttgcttcgtagttggtgctctgttctcaacaatcgcgggttactgcggaatgacagttgctactaaggcaaatgtcagaacagctaacgcagctaaagagagcggaatgaacaaagctctttccatcgcgttttccggtggtgccgttatgggtatgtgtgttgctggacttggtgcacttggtgtcagccttgtgtacatcgtaactaagaatgtagatgtattattcggattcagccttggtgcttcttccatcgcattgtttgcacgtgttggtggtggtatctatacaaaggcagcagacgttggagctgaccttgtaggtaaagtagaagcaggtatcccggaagatgacccgcgtaacccggctgttatcgctgacaacgttggagataacgtaggtgacgtagcaggtatgggagctgaccttttcgagtcttactgtggatctctgatctcagcactgacacttggtgttgcagtaagcgaagtttcaggagtattattcccacttgcaatcgcaggatgcggactgatcgcttctatccttggaacattcttcgtaagaggcggagagaacacaaatcctcagaaagctcttacaaaaggaagctatgcttcttcagcaattgtaattattgcttctttagcacttagctgggtgcttttcggaaacatgaacgcagcaatcgcagttatcgctggtctggttgttggtgttatcattggtaacatcacagagtactacacatcagcagattacaaaccggttaaaggaatcggagagcagtctgagacaggtgcagctacaacaatcatcagtggtcttgcagttggtatgaaatcaacagctatcccgctgcttctgatctgtgttggtatttttgtttcttataatgtatttggtctgtatggaattgctcttgcagcagttggtatgctttctacaacaggaatcactgttgcagttgatgcatatggtccgatcgcagacaacgctggtggtatcgcagagatgtctggtcttgatgagtccgttcgtgacatcacagataagcttgactctgtaggtaatacaacagcagctatggggaaaggatttgctatcggttctgcagcacttacagctcttgcgctgttcgtatcttatgcagagacagttggtctgaaatccatcaaccttcttgactacaaagtaatcatcggtatctttatcggtggtatgcttacattccttttctcagcatttactatggagtctgtatctaaggctgcatactcaatgattgaggaagttagacgtcagttccgtgagaaaccaggcattatgaaaggggaagagaaacctgactacaagtcatgcgttgctatttctacaacagcagcacttcacgagatgcttcttccaggtctgatggcagttatcgttcctgtagtagtaggtgttcttcttggagttgatgctcttggcggacttctttcaggatccctcgtaacaggagttcttatggccatcttcatgtcaaatgcaggtggtgcatgggataatgctaagaagtatatcgaagaaggaaaccacggcggaaaaggtagtgaggctcataaggcagccgttgttggagatactgtaggagatccgttcaaggatacatcaggtccgtccatcaacatcctgatcaaacttatgacagttgtatcacttgtattcgctccactgttcctttctatcggaggacttctgtaatacctttgtaatccatatatggatgatattaagaatataagttgaaagaaaacgttttccggggatttccccgggggacgttttcttttttctgtgttgcttttacttgttttgttatataactataaaactggcttgtataaatgttttaaaactggatatatctaacagaccagggcgctgatataataaagcggtatgttgggaaaaattcacttacaagtctgacattatccgtcaggtaattactcaacataagagataacaaacaggagatttacaaaatatgaaaaacgaaagtatcagcacaaagaaaatcgtaatgactgcattttttgcagctattatttatctgggaatccagtctttccgtattccgcttccggcggctgtcggaacaccatttctgcatttcggacacattttcgtaatgcttgcagtattaatgcttggacctaagctttcaactgtggcaggagttctcggacttctcgtctttgatgtattgaacggttatattcaggcaatcccgaatgtattcgtcagcacaattatcaaatgtctgcttgtgggcatgatctttcagtctctgaagaaaaaagcgcagggagatgcgaagaaggaatatggttatgcagtcctctgtgcggctatctacggcattacgaacattatcgtagactttatctggtcaacagttgaactggttattctcggaagttcctggagtgcagcgttggcagcggagattacatctatcccggctacgatcatcaatgccggattcacagtagttggaattgcgattctgtatgttccggtgaagaaagcttacaagagaatccttggagcataagaatcaggattcagattatttgtgccaggcacttatagaggtagtttcaaggtcatttgtgccaggcgcttattaaggagatttcataagttggatattataaagatacagaaattattgaaggaagcaaaaatggacggctggttatttacagatttccaaggtcatgactttatcacgaaagagtttcttaagcttggaaatcgtttctgcacaagaaggctgttctatttgattccggcgcagggcgaaccggtgaaggtgctctcagcgattgaaccacttcttctcgaacatctaccgggaaagaaaatattatatcaagggatcgaaggacagaagaaagtgctgtcagaattattgaagccgggtatgaagattgcctgccagtactctccgggtggaaatgtcccgacaatcagctctatggatgccggcctgattgagtatcttagaacttacagaatcgagccggttacaagtgcagatctgatgcaacacttcggtgcggtactaacggaacatcagatagagacacaccgacaggccggagttatcatacataagatccttacggatacattttcttggatccgagagaagatagatgcgggaacttatattgatgagtatgcaatgcttcagaagatgcaggagctgatcagacaggaaaacatttatatggattctccgccatttttcggtattgatgaacatgcatgtgatccgggatatgaaccaaatgaaaatgattcgaaacagatccgtgaaggcagcagattgatcatagatattgccggacgtcttccggaagaggatgcggtatattatgatgtatcctggtgtatgaatgtcggagagaagattgagccggagtacaagaaatggtttcagatagtatatgatgcacgtgaagatgcaagacagtttattcaggcgagattagatgaaggagaaactgtcagaggatatgaagtagaccgcaggctgaaagaacggtttgaacagcttggatgtgcacagtatctgatgcaccggacaggacataatatcggtcatagatgtcatggaatcggcgcaaatctggatgattatgagacacatgatgaccgctgtctgcttccagggacgatgttttccatagagccgggactgtatacagagaagtatggtgtaagactggaatatgatgttcatattacttcggagagagaaacgaaagtgtatggacccgtgcaggatgagattcttgtgatttgatcaagggttaaaggaatatagttcaccatagtttcaaactatgacaaatgcataaatttatatatttttcaaaataagcatgggatgataagatgattgcagataaaacgttactgttcacacgatgtgcgaccagcaacgcatctcgccattttaaatcgcctttggcgatggggcgagatgcattcaagccaaaacatgcatcctccgtgtcaatcagcgaagtgattgacacaggagtgaacagtaacgataaaacatcacttacaaaaataaaaggagaattaatttatgagtaaatatcagacaccatgcggatacgattttgtgggaagttttttgagaccggaagaggttaagaaagcgaatgcagattatcaggaaggaaagatcagcgaagcagaaaagaatcagatcattgataaagcggttacagaagttgtagcaaagcagaaagagcttggatttcatgtgatcacagacggagagttcagaagaacttactggcatctggattttatgtggggatttgaaggtgtcggtcatgaacagaccggcagcggggtacagtttgatggagagctggcatcactggaagatacttatctgacaggaaagataaaggcaaaggcgcatccgtttgtagaacatttcaaattcctgaaacagtttgaggatgagaacacagttgcaaaatatacaattccggcgccggcgcagatgttccagcagatgattattccggtcaactataaaaatacgagaaaatattatgagacaaacaaagaactgatccacgacattggaacagcttatcaggaagtaatcggtcagttctatgaagcaggatgcagaaatcttcagcttgatgactgtacctggggagcaattgtcggagatgcggcaaagcagagatacaaacttcttggaacggatattgaagatgtgaaaaaagagcttcttgaagtgaataaccttgcactggaaggaaaaccggaggatatggtaatcacttcccacatctgtagaggaaattatcattcaacattttttacaagtggaccgtatgattctgtagcagattatgtctttgcaaaagaaaatgtggatgcattattccttgaatatgatgatgcaagatccggcggattcgctccgcttgcaaaggtatctccggataaaaaagtggtattagggttaattacaacgaagatacctcagctcgaggagaaagaagttgtgatcaagagaattcatgaagctgcaaaatatatcccattagacagactttatctcagtccacagtgtgggttcgcttcctgtgaaatcggaaacaaactgacagaagaggaacaatgggcaaagttaaagcttgtgaaagaaattgcagaagaagtctggggagagtaataagagttgagttgctgcttatacagagtgtaaacggcaactcaatttttatgcacaatacttcttcaacattcttctggctattttttcatcttctccatgaataacgaggagaaacggaagaccaagctggatcgtggcaagctcagaaagatcttttccgttgatatctacgcgattgtggttctcaagatcctggatgcgcacatccgaagaaagatttttacaagtgtgtgaaaaagtgagaaattgtccggttgtgagaaatttaatgttttgcttgatcatgatatcgcccctcgtaaatgaatgtgtttgattttttcgtcattcagtatataataaataacaaagaaataaaaatacatatttgttatgacagatatacattttttatatgatttatcagatgtggtttgactcccacctctgcaggtggagagtaacagattagtgtcagtttaggggggacttatggaaattacttatgattattaccggattttttattatgtagcaatgtataagagcttttctaaagcggcgaaagtattgatgagcaaccagccgaatattactcattttatgaataatctggagaatcagcttgggtgtaaattgtttgtcagatctaatcgaggagttacgcttacagcggaaggagagaagctgtatcagcatgtttctgttgcatatcagcatcttcatgcggctgaagcggagcttgcaatggagcgaagcatggagagcggaagtatcacgatcagtgcgagtgagattgcacttcatcttttacttcttcctatactggggcgctttcataagcaatatccgggtgttcggctgagacttctgaatcattccacgccggaggcagttgagtccgtcaagaacggactggcggactttgcagttgtgactacgccgcttcaggcaaagaagccgttgaaaagtacttctttgatgtcttttaaggaaattgcagtgggagatcattcttttcaggggaaagaaaaaccaatgaggctgaaagagttaattgagaatccgttgatttctcttgggcagggaagcacaacctatgagttctattccaaatttttcctggagaacgatctggttctatctccggatacggaagttgagacgatcgatcaggtgttgccgcttattatgaatggactgggcattggattccttccggagctgttcgtaagaccagtgatcgaggaaagaaaggtctgtcagattccactaaaggagaatattccggagagaaaaatctgtctggttgagaatcatacatttccgccaagtattgcggcggagatgttcaaaaaaatgttagttctgaaataaggtattgtttaagaagatattatggattcaatctattcctatgtagaaaatatatatcagatatgtgaataaaacagtatgcgccggtttgactttagaaccggcgctttctatattaataagtaggattttattctgttttaacaggtgaaaaacaagaaataacaaaggaagtgtgagtatgcagacagtattaccacgtgaagaagctgtagaaggagttatatctaaggttcttgagtcacaagaggcctgtgatcggctaaatgaagtattttatgagcatttggagaattatcaggaaataaatgacgatggtgacagacattttgcagaggtcttgctccaggcgtataaaaatggagatgtcagcgcgttgctacttgaattgtgcggaggaagtatgtttgatctgcttcgggacgcatatctgattccaaagaaatttcatggaaaatcaggagagaatccggttctcctgactgatgtagagggaaagcttctggagagtaagaaaagggaagtaacagctcgtgaatatgaaaagttccatgagacatacaggcaacatcaatgtgcaccgagatcaaaactgtatcttgctgacggatatgacatagttcgttcctatacagagggcatgcagattcaggagaaaaaagagaacaagaagcgtggcgtgatggtgttatatgcattaccggataccagaaagcttggactgacagaagcacaggcctatgcagttgtctgggatactttccagaagattcagaaacaggctccgagagtagaagtttattatgggcaggataccggtgagaagcgtcagaaaggatttgacgagataggggttttacttccaattcatggatttgagaaacgaatgcttcatcatttggatgagattgatgggattgttctttcatgcagagagaagatgatgaaaaaggccggagcggaaagccttgacctggaataaagaggaagtgaatgagatgcagacacagaaaataagaaaaaatcatatggatattctctggcatgaatatacagataaaggtggagaagaaacaccggtaacacaagcaagtttgacggagaaagcatcaattgtcggaagagtggggattatgcttctctcctgtggaaccggagcttggagagtgagaagttctatgaatgctctggcagaagagatggggataacgtgtacagcggatattggtctgatgtcgattgagtatacctgttttgacggtgacgacggattcacgcagtccttgtgtctgacgaatacgggcgtgaatacatcaaaattaaacaggttggagcactttatccgtgaatttgagcagggagaacaggaaatgtccggagaagaactgcataagctgctagatcagattgaagagattcatggactctattctccaactgcattgggaatggcagcagcattggcatgcggtggatttacatttctgcttggcggtggattgattgaaatgttctgtgcctttgtcggtgcagggattggaaattttatcaggtgtaaattgagtaaacatcattttacattgtttttgtgcatagcctcatctgtttcagcagcctgtctggtttatgcgggacttttgaaagcagcagaacttttgtgggcaatttcaattcagcatgaggcgggctatatttgcgcaatgctatttattattcctggttttcctttcatcacaagtggaattgaccttgcaaaattggacatgcgttctggcatggaacgactcatgtatgcactgattattgttttggtagctacaatgtctgcatggatcatggcgttgatcttaggattacagccggtggattttctgaagcttgacctgacgcaggcagaatggattgttttccgtctgcttgcaagcttttgtggtgtgtttggattctcgattatgttcaacagccctacgcgccttgcggcagtggcggcaggaatcggtgcgattgccaatacactgcgattggaactggttgatctgacggcattgcctccggcggcagcagcatttgtcggagcattaacagccggacttctggcaactatgattaaaaatcaggttggatatccgagaatttctgtcacggttccgtcgattgtaatcatggttcctggattgtatctgtaccgtggattttataatctgggaacaatgaatctttctacatcagcttcctggtttgcggcggcaatattgattgttgcagctcttccgttagggttgatctttgcaagaattcttacggataagacatttcggtattgcacgtaaggagaatacatacaaaaaaggaacagctctttgtgaactgttcctttttcaaataaaatagaaaggaatttatttctttttatcttttttcttgtctttgtctttcttctttccggaagatttctcgttgtctttatcctttgctttcacagagattttcttatctgcttcagcttccggctgatatccgttgatatcatatttcttctcatattcctcaaaggctgtaagataagtttcatccttcagcttgcggacactctttgtatattcatgaatatcaaagttagaagaatcaagctcgagaatcgctacagcaatgttagaacagtgcgctgcgatacgctcgtagtttgtaagcaggtcattaaaagcaaatccggtattcagatcacactgaccatttctaagtctcttaatgtgacgaagtttcagatcattacagagaataccaatcagttcgcgcagaggttcaacctttgcagcagtctcaagatcttcatctacaaaagaatttactgtaagatcaacaatctcaaccaatgccttctcaagcacattcagctcataagtagcagattcagagaatgtacgggacttttcgtgaagttcctgggcaactctggaaatgttgactgcgtggtcaccaagtcgctcgaagtcactgatcgtatgaaggaacttggaggtctgcttcgcctgatcaggtgtcatatcatgcatacttaactgcatcagataagtaccaagtttatcctcgtacttgtcgatcatgttttccttttcctggatcttattgaacttgctgtcgctaaagtctgtcagaagttcgaaagcgcgcatgagattcttgcgggcattcttcgccataccgttaacagccatctgactctgactgatcgccagcggcgggtaatccagaaaacgttcctcaagcagatcaaaatcagcctgctcttcgttgtcttcgtctgtatctttgatcaggaagaagacaagcttctcgatcttgctgataaatggagcaagaatcaggatcgtagcgatacggaataccgagttcaataaagcaatgttgacaggactcatgaccatgtccataaatgtaaagtggacagcggcatttactgagtaaaatacgatagaccaaaagatcattccgaataagtcattcagcaggtaaataagtgctgtacgctttccgttcttgttcgtaccgatagaagaaagcagtacaggacaggcagctccgacaccaatacccattgtaataggcagtgcggcagcaaatgtaatagagcctgtgattgataatgcctgaaggataccgacagaagcagatgcactctgaagcactgcagtaaatgcgataccaacaaggatacccataaatggattcttaaacattgtcagaaagctgacaaaatgtgggttctctttcagaggtgaaactgcaccactcattgtctgcattccgaacatcaggatcgcaaaaccaagcataatgtcaccgatatcggaataaggtttcttctttacaaatgtacggaagatgataccgatgatcgcaacgatcgcagagattgtcgcggtggacagaagctgcgcgatgccactggagccatcaatgtaagaaagacataaaatccagcctgtgatacttgttccaatgttggcacccataatgattccgattgcctgagcaactttcatcataccggagtttacgaatcctacgaccataacagtagtagctgatgacgactgaatgatcgctgttacgactgtacccagcagcaatcctttgattggggagtttgtgagcttgtataagataagttccagtttgttaccggcaaccttcttaagactgtctcccatgagtgccattccgtacaggaagagggcaactccgctgagcaaggacaaaaccattgtaattcccattttcttttttcctttttcttaagttattaagttgacatgttacgtcttgcaaaaattacgtacatggctattataaaacactttacccggagtttacaattattttctttaaactttacagaaaaatattgattgcaaattgcagaaaaattgtagggataaacaaaatgttgatcttaagcaaaaaaatccttgacttgtccgtggataatttccatcagatgagttctcgcttccacgcttgcccaggcaatatgtggcgtgatcagcaggcgcttgctgtctttgaattgaaccaatggattatctgcggacattggttcctcacaaaggacatctaatcctgctgcgtcaatctgattcctgaccagtgcattatgtaatgcctgctcatcgacgatcggtcctcttccgagattcaggaaaatacaggaagatctcattttttcaaacgctttgctgttgatcagtccttctgtatgctcgttgagtggagcgtggacggaaataatatcagactgcgtaagcaatgtctcaaagtcaacctgttcataaccttcctgcgccggagcaccggaggcggagtagtaaatgaccttcgctccgaacgcacgcgcaacctcagcgacacgtctgccaatcgctccaagtccaatgatcccccaggtttttccatggatttctgtgaaatgttctgcaaaatgagtgaaagagacatcatttacatagcgctcttctttcacataatcatcataatagcgcagcttttctaatagaaagagaagcattgcaaatgtgtgttgtgcgacagtctctgtagagtagccggcaacatttctccaggcaattccttttgaatcaagatactctttatccaggttgttcgtgcctgtggctgtgacacagacgagcttcagattctttgcagttccaatagtctgctcattgaccggaactttatttaatatgatcacatcagcatccgtgacacgcgccgggacctcttcgggtgaagaaaagctgtactttacaacttcaccgagttcatcatatgcagaaagatcaatatcctctccaattgttttgacatctaaaaatacaattttcatttaaaatctccttgtttcataatcagtattaaacagtgtaattattttagcataaaaagaacataatttcctatattttaccacatactaattaaaaattaatgtgactgttcagagccaacctccaaaatgctatgcatttcgtcggtgtggcgtatccgccaaataaaatttcaaaaacagtcttaaaaatgcatgcattttacatctgttttatgaaattttgcttggctctgaacagttacaaattaatattggaggaaatgtgccatgaaagccacagggatagtccggaggatagatgatcttggaagaatcgtaattccgaaagaaataagaaggacattgcggatccgcgaaggtgatccactggaaatttttacagacagagaaggaaaggtgattttaaagaaatattctccaatcggtgaattaggaacactggcagggatttatgcagatagtctttcaaagacacttgattgtacagtctgtatcactgatacagatcaggtgatcgcggcagcaggaaacgggaagaaagaacttcaggaaatgctgttgagtgcagagctggcagaagtgtttcaacaaagaaagaccgtgttgacaaagagcagtgacgctgagtttgtagcaattacaaaagacagaagtgaatacagagaggaaataatcagtgttattctcagtgaaggtgatattgcaggcggagtgatctttctgcagaaaaatgagaaaaagcattttggagaaatggaaaagaagtttgcgtcgggtgtggcagatcttcttgggaggcagttgagctaaaagcgtcatatttttccgggaggatgcatagaatagtatcagtggaaaaccggacatgcatcgaaaggaaaagaaaatgagagaaaatcatgggaaaaaagggataatatacgcagaaaatttagtgaaggcattactttgcgcctatctggtcacagggatgtttctgttaattcttgcacttctcctttataaagcaggattgagtgaagaaaatgtaaatctgggaattattctcatttatgtaataggaactttctcgggaggctttgtgatgggaaaactggaaggccaaaagaagttcctctgggggcttggaaccggtgtggtttattttgttctattactgctcatctcatttggaatgtaccgtgaggtttcgtcagggacaggagatttgtttctgacatttgtactttgtaccggaggtggaatgcttggtgggatggtcgcatgaagaaaaaccagacagatgtgtgaaaaaatactttaaaaacctggctgtgtgtgctataataacgaaagcaatatgtgcgaagttaggaggagtaaaaatgaaacacattaaaacactgaatacacagacactgaacaacacagttaaaaaaggtggatgcggagagtgccagacatcttgccagtctgcatgtaagacatcctgtacagtaggaaaccagacttgcgaaaacgcaaaataagaaaacctgaaagtgaagataatgttgctgcagagttgctttgagcggtgatactgcctgcaattatgcgaaaaacagcaacaggattacaggtgaggcagcggtgcaaatcgctgccttaagcatgttttagacgtatctgcttagagctgcattgtgaaaatgccgggctttgaacagttacaaatagatttacaaatacatatagaaagcgaggtatccacgtgatacatcagtaccagaacaatggatataatatcgtcctcgacgtgaacagcggagctgtacatgttgtggatcaggaagcgtatgatgtcatcgaagtgcttaatcgcatgaatgaagatcatacagtggagacattgaaatctccggaaacagcagaagcattgaaaaaagagcttggagagaaatattctgagaaagatctgctggatattttagaggcagtaacagaactgacggaacagggacgtctgtttacaaaagacatttatgagagctttatcgacgttgtaaagcagcgtaagacagttgttaaggctttatgtcttcatattgcacatgactgtaaccttgcctgtaagtactgctttgcggaagagggagaatatcacggccgcagggctctgatgtcttacgaggttggtaagaaagcacttgatttcctgatcgcgaattcaggaacaagaagaaaccttgaggttgacttcttcggtggtgagccgctgatgaactggcaggttgtcaaagacctggttgcttacggaagagagcaggaaaaacttcatgacaagcatttccgtttcacacttacaacaaacggagttcttttgaacgatgaagttcaggagttcgtgaacaaagagatggacaacgttgtcatcagtcttgatggaagaaaagaagtgaatgaccagatgcgcccgttccgtaacggaaaaggaagctatgatctgatcgttccgaagttccagaagctggcagagagccgtaatcaggagaagtactacattagaggtacatttacaagaaataacctggatttttccaaggatgtagaacatttcgcagatcttggattcaagcagatgtcaatcgagcctgtagtaggtgatgacacagaaccatatgcaatccagaaagaagatcttccacagatctttgaagaatatgataaactcgcaaaattcctgatcgagcgtgagaagagcggaagaggattcaatttcttccacttcatgatcgatcttgaaggaggaccgtgcgtgtccaagcgtctgtccggctgtggttcaggtacagagtatctggcagtgacaccttggggagatttctacccatgtcatcagtttgtaggacaggaagaattcctcatgggaaatgtcgatgagggaattacaaaaccggagattgcggaagaattccgtggatgcagcgtatattccaaggaaagctgcagaacctgctttgccagattctattgcagtggtggctgtatggcgaattcttacaagttccacaatacgatccaggatacttatgaagtgagctgtgagatggagagaaaacgtgtggaatgtgcgatcatgataaaggctgccctggcggatgaagaacaataaagttagagagcagtagtcaagaaaggaaagaaagagatgaagaaaggtaagagtattctcagcctcattctcgtaatcgcagttacagcactcttcggtatgacctgtgtgcttggacttgatttaaagggaatgggagctgcgaagaacatcaatctcggtcttgacctggaaggcggagtcagcattacatatcaggtaaaaggtgacaagccatctcaggcagacatggatgacaccgtgtacaagcttcagaaacgtgtggagcagtacagcacagaggcacaggcttatcaggttggagacaaccgtatcagtatcgagattccgggtgtgagcgacgcaaacaagatcctggaagaacttggacagccgggttcactgtactttatcaagcataaagacagtgagggaaatgaaaactattccctgacagcttccggatatacactgaataagtcaatcgacgaactgaaagatacagactccatcgtactgacaggtacagaagtaaagacagcttcagccggagtgctcaacgactcaacaacaggaaataaaaagtatggtgttgatcttgagttgacagatgagggtgcagagaagttcaagacagcaacagaagaagcttataacaataaccatgacacaatcgctatttactatgatggttctctgatcagcgtgccaagcgtaaatgcagtgattgagaatggaaaagctcagatttcaggaaacatggattatgaagaggctgataacatcgcttctacaatccgtatcggtggactgaatctggaacttgaagagcttagctcagaagttgtaggagcacagcttggacaggacgctctgaaaggaagtctgatcgcaggtatcatcggtctggcaatcgtatgtgtattcatgtgctgggtatacctccttccgggacttgcatccagccttgcactgatcctttacacagaattgatcctgatccttctgaatgcatttgacattacactgacacttccgggtatcgcaggtatcatcctcggtatcggtatggcggtagatgcgaacgttatcatcttcgcccgtgtgaaagaagagctgacagcaggaaagagcgtacacgcttcactgaaatcaggattccagaaagcaatgtccgcaatcgttgacggaaatatcacaacactgatcgcagccggtgtgctgtggcttcgcggaagtggtactgtcaagggatttgcccagacacttgcactcggtattgtcgtatccatgtttacagcacttgtgatcacaagactgattatctttgcattctatggagcaggcatccgcaatgagaaagcatacggaagacatctgaaagaacgtaaaccggttgacttccttggaaagaaaaagattttcttcattgtttccatcatcctttgtctggccggaccggttatgatgggcgtgaaccatgcaagaggaatcggcgcaatgaattacagccttgattttgtaggcggtacttcaacaaatgtaacatttgataaagaatatacactggaagagatcgacagccagatgatcccaagcctggaagagatcacaggagataagaatattcaggttcagacagtaaaagacagcaatcaggtagtcttcaagacacagacacttgatcttgagaaacgtgaagcacttgcttcttatctgaatgagaactacggggtagaggtatctgatatcgctacagagaatatcagctcaacagtaagttccgagatgagaagagatgctgttatagctgtgatcattgctacaatctgtatgctgctttacatctggttccgtttcaaagatattcgtttcgcaacaagtgctgttatcgcactgatgcatgacgtacttgtagttctcgggttctatgtgatcgcaagagtatctgttggaaatacatttatcgcatgtatgctgacaatcgttggatattctatcaacggtacgatcgttatctttgaccgtatccgtgaggcgctggcaacaaagagccgtacagaagatctgaaggatcttgtaaaccgctgtattactcagacactgacaagaacgatttatacaaactttacaacatttgtcatggtcgttgctctgtatatccttggtgtaagctccattaaggaattcgctgcacctctgatggtaggtatcatctgcggtggatatacatccgtatgtatcacaggtgcactgtggtatgtgatgaagacaagacttggtgaggaagcgaaggctgcgagagcagcttccggcacaaagacagtttctgtaaaagcagcagacaagaaagaaggaactacttccacagagagtaacgcagcagatacatctgcagacgacagctccaagaagaaaaaaggaaagaagacttctttcaagaacaaaaagagcaaaaaacgctaagaaataaatagcagcctggaaacagtaatgaaatagaatctgccgtatcggaaatgaaaaatgattttcgatacggcagatttttgttataataagaaaagatatgatactgacagactgggaggggatttggatggagaaatggttcgtcgcaatgaaaaaggcggattttaatggaatagcagagaaatatcagatctccccgatcattgcacgactgatgaggaaccgtgatgtgatcggagatgaagcaattgatttttatctgaatggaacagtggaggatctgtatgacggcttactgatgaaagatatggatcgtgcggtagatattcttaaggagaaaatagaagaaggaaagaaaatccgtgtgatcggtgattatgatattgatggagtcaatgcaacgtatattttgcaacaggggcttgcaggacttggggcagatgtcgatacggatattccagacaggatcaaagacggatatggattgaatcagatgctgatcgaccgtgcactggaggatgatgtagacacgatcatcacctgtgataatggaattgcggcaatgagcgagattgcttacggaaaagaaaatgggatgacgatcgttgtgacagatcaccatgaagttccgtatctggaagaaaatggggagaaaaaatatcttctgccaccggcggatgcagtggtcgatccgcacagagcagactgtgagtatccatttaaagggctgtgcggcgcagctgtagcgtataagctggttgaggttttgtacagagtgtctggaaagtcagagcaggaggtagagcatctgcaggaaagactgatggaaaatgttgcgattgctacgatcggtgatgtgatggatcttgttggagagaatcgtgtctttgtgaaaaagggacttgagcttctgaagacaacgaagaatgaagggcttcacgcattgatgcaatgtacaggggtagatacagcgaacctgaatacttatcatatcggatttgtgatcggaccgtgcatcaatgccggcggaagactggatacagccaagcgtgcactggaactccttaatgcatcgaaccggagagaggcagtgacactggcagcagatctgaaagaattaaatgacagccggaaagaaatgaccgaagaaggtgtagaagaagctgtccggcagattgaatcaagttcctggaaggacgaccaggtgctggtcgtgtatcttccagagtgtcacgaaagtatcgccggaattattgcggggaggatcaaggaacgttattatcgtccgacctttgtactgacaaagggagagacaggagtgaaaggttccggacggtcgatcgaagcctatgatatgtttgcggaaatgagccgctgcagggaattatttacgaagttcggaggacataagctggcagcaggactttctttagaagaggaaaaggtcgaagttttccggaaacggatcaatgaactggcggatctgacagaagaggatctgcagatgaaggtgtcgatcgatatgcggcttccgtttccatatattaatgaagagctgatccatgagcttaagatattggagccttttggaaaaggcaatgggaaaccgttatttgcagaaagtaaactgcgtgtgatccagccaagaatcttcggaaagaaccggaatgtgctgaaatgcagactggaggaccagcagggaaatcagatggaagcggtttatttcggagaagtggaagactgtctgcggcagatggaaaagaagcagatcatgtcttttacatactatccatccatcaatgagtacatgggacgaagaacaattcagcttacaattgtcaattatcagtagataatatcgaaaaaaccgtacaaattgcttaaaatgaagaagaatgggaagttcttatttgaaaaagggaaaaatagtgatatactaaatcatattaattgttcagaactaaggcgttttgtgtctaaaatgcatttgttgaatatgccatattgacgaaatacgaagcattttgggagttggatctgaacagaacacaggatgaatgaagggggaagatgatatggcaggcactcgggaatatgaagatctgaataaaaatctggagatagtggacgggcatgcagtaaaagcaccagaggattatcaggatccggaggagttatatcaggcattaatagctcgtgtgcgtaagtatcatccttctgcagatattacgatgatcgagaaggcctatcagataggcaaagaagcgcataagaatcagttccgtaaatctggagaaccttatatcatccatccactctgggtggcaatcatacttgcagatctcgagatggacaaagaaacgatcgtggctggaatgcttcatgacgtggtagaagatacgacaatgacactcgatgagatctcagcagagtttggtgaagaggtggcacttcttgtagacggcgttaccaagctgggacagttgaactattcccaggacaagctggaggcccaggcagagaacttaagaaagatgttccttgcgatggcgaaagatatccgtgtcatcattgtaaaactcgcagaccgtctgcataatatgcgtacaatggagtttatgacaccggcgaagcagaaagagaaatcaagagagacgatggatatctacgctccgatcgcccagcgtctcggtatttcaaagatcaagacagaactcgatgacctttctctgaaatattatcagccggaagtttataatcagctggttcatgatctgaatgcacgtaagacggaacgtgaagaatttgtgcaacagatcgttgctgaagtatcaaagcatatgaagaatgctgatattgaagcgaaagtatacggacgtgtaaaacatttcttcagtatttataagaagatggtgaatcagaacaagacacttgaccaggtgtatgacctgttcgctgtccgcattatcgtagattcagtgaaagactgttacgcagcacttggtgtgatccatgagatgtatacgccgattccgggacgtttcaaggattatattgctatgccgaaggcgaatatgtaccagtctctgcatacaacgctgatcggaccttccggacagccgttcgagatccagatccgtacagaagagatgcataagacagcggaatatggtatcgcagcccactggaaatataaagagacaggcggaagcaacacgaaaggactgaacacacaggaagagaagctgaactggctgcgtcagatcctggaatggcagagagacatgtctgataaccgtgagttcttaagcctgctgaaaggtgacctggatctgttccaggaagatgtatactgcttcacaccgaacggggatgtgaaaaaccttccgaatggctccacaccggttgacttcgcctatgcgatccacagtgcagtcggcaataagatggttggcgccagagtgaatggcaagcttgtgaacattgattataagattcagaacggagaccgaatcgagatccttacatctcagaattccaagggaccgagtcgtgactggctgaatatcgtcaagagcacacaggcaaagagcaagattaattcatggtttaagaaggaatacaaagaagataatattatccgcggaaaagatctgatcagtgcatactgtaagagcaaggggattaatctgccggatattatcaagccgaagtatcagcagatcgttcagaaaaagtacggattccgtgactgggatgcagtacttgcagcaatcggacacggcggactcaaagagggtcaggttgtgaaccgcctgctggaagagtacgagaaagagcataagaaagagatcacggatgagaatattttggagaagatctcagaagcgaatagacagagagtacacattgccaaatcaaagagcggaatcgtagttaagggaatcaatgatatggcagtacgtttctcaaagtgctgtaatccggtgccgggagatgagattgtcggttttgtaacaagagggcgcggaatgtcgatccacagaacagattgtatcaatatcatcaatctttctgatgtggagagatcccgtctgatcacagcagaatgggaggataatgatctcgaagaaggcggtcagtatcttgcagaactgaagatatttgcagacgacagaagaggacttctgctggatgtatcaaaggtatttaccgaagagaagattgatgtgaagtccatgaatacccggacaagcaagaagggtacggcgacaatggagatgggatttgttgtacacggaagagaagaattgaatcgtgtgatcggaaagctcagacagattgaaaatgtaattgatattgagagaacaacaggctgatggaggaaaacgaatgaaggttgaaagtattgtactggggtcaattggaacgaattgctatattgtaaccaatgaagagacgaaggaatgttttgcagtggatatggcagaatgtccgcaggaatatgtcaattatatcaagaacaatggactagaaatgaaagcattgtttctgacacacggacattttgaccacatcatgggaatcgatgatttcctcaaagcctttcctgtgccggtttacgcaggcgaagacgaacttccggtgatcgaggatgaccgcctgaatgtttcttgtatgtacggaccgaaatacgcattccacggagcacagcctgtaagagacggtcaggtgatcgaatgcgcaggaattgaagttgatgtacttcatacaccgggacataccgtaggaggatgctgctattaccttccaaaagaacatagattgttcagtggagatacgctgttctgtgcttccatcggaagaacagacctaccgacaggaagcagcagtcagctggtccgctctgtacaggagaagatcatgacacttccggatgatacaaagatctatccgggacatatggaagagacatcagttcagtttgagaaggagcataatccattcatatgataaagatagaaagtaagaagaacaaatttacttataacgtataccatgtcacgaaagcattttatccaaaagaggatatcgtgcagacagtagatgagaagcaagaaccactggtgaagatacatttgccggaagggacttgcttttcccttgcaccggaagaatgcgtgcagacagaagatgtgcaggaagagaaacgcgatgtaacgaagaaagtctatcagtttctctcaaagcagacaggacaggaacttgcctggggaatgctgacaggagtccgtccgacaaagcttgtaatgcagaaaatcgagcagggaatgacaaaagaagaaatctttagatttctaaaagaacaatattgtgttggtgatgaaaaagcacagattgcctatgagattgcatgccgtgaaaaggcacttcttgatcagttggactgtaaaaatggctatagcctgtatgcaggaattccattctgtccaagcatctgctcctactgctcattcagctcttcaccaatcgctgagtggaaagatcaggtcgatcgttaccttgatgcgatgatcaaagaattgaaagctacagcaaagctgatgcagggaaagacgctggataccgtatatatcggcggcggaacaccgacaacactcgaggcagatcagcttgaccgtctgcttggaacgatccgggagaattttgacctggagcatgtgcttgagtttacagttgaagccggaagaccggacagcatcacacgagaaaagctcgaagtgatccgcaaatatcctgtaacccgcatctctgtcaacccacagacaatgcagcagaagacactggatcttgtcggaagaaaacatacggtagaagatgtagaacaaatcttccacctcgcacgtgagcttggattcgataatattaatatggatctgatcgccggacttccgggagaagatgcggcagatatgcaggatacacttgagaagatcgagaagcttcatccggatagcctgacagtacacgcactcgcgattaaacgtgctgcgaagtttggccaggaaggaagaacaatggatccggggactgagatcacacagatggtcgaggcggcagcagcgtcagcagaacgcatgggacttgtgccatattacctgtatcgccagaagaacattgccggaaacttcgagaatgttggatatgcagagcaggacaaggccggggtgtataacattttgatcatggaagagaaacaggccatcctggcttgcggggccggagcatccaccaaacgtgtctggaatctaccagatggttatcacattgaaagatgcgagaatgtcaaggatatcaagcaatatatcgctagaattgatgagatgattgaacgaaaaaaagcactttttgagaaggattgaaaacgaaaaatacctcccaaaaaagggctggtacatcatttgtacatcaaattagttcgaaaatctgtgaaaatcagtgctaaataataccaaatttactatatgacgtacaagaaaacctaataaccttaccttaaaagacgaattcattatgctaaatgagttcgtcttttttctgttattgtttaaaacttgcgaaaggaggaggaaaaataacttgtacgaagtttggaggaaacagcagatgttaaagatacgattaatgggaacgaaaagtgatattagatggtttcaaaattttttgcagattgattctgacatagaggtattagaattatcagatatctatccgaataaaggaacagatagatattatagatcatatgcagaagtagaaagaaaagatggcaacgcaggccgcccaacagagaatggaaaaagcaatcggaaaaacaataccgaaaaagcaaataaaggcactagttccaccaatcaaagcaaagtatcctatcatggattggaagaatcttccgtttaatacagcagcctagaaagaatccgaaaaacttgcaggaaaagaaggatataaacatccggtgcgtgtcgtatataatccaaaaacaatgacctatcgaaccatcttaaataaatcaaagttccaagtgattgataagaaggatggacgatataatcatcaagaacatcataaacaatggaaccaactcacaacttgaaagaattagcagatttaatgtgggtaaaatattcgattgaggagccgtatatgggtgagataccggatttttgcaattgttatagtaaaatgttagaaggagacaatgtcgaatattttagatatccagaatatagtagaaaaagatattttgcaggaaaccgattggatatcgaatggttatcctacaattttgcactgattttattaaaattattacaatttgcaaatctgactttatgatttgaaagtgactatggagaagtctatcaagtgaaatagtttttgagattgcagatgttatagaagaggttccgacggtttgctggtgcggaaagcgtgcgcagtgcaacacaagatatgcagacggcaagattgttcgaaagggcgcacaggtcatgcttggattgaatgaaagctatgtagcattatgcaggaagcattacaaggaaggccaattgtgggaacatgatccgggagatattccgggtgataataattaaaatcataattaaaaaaggagaagcatgaaatctcgaatcatctcatgtcttgatttctggtatattgcaatcaattcttttgattcagcttgcaataataggattctcatgttaatctaataccatgcagtccacattctggtggactgcaaaaagatctattaaccaaatcggtaattattcaataagctcagtatctcgagcagataatccgatgacaaccgaaaaaagatgaatatcgtttgagagattatgtgattaagaaatcttgataattttgcttcttaaattgtatggatcttcgattctgctatccaatcacttccatagaaagtaatcttatgttaagatgaaagtagttttataatcctttcctcaagcgatgcttcatcgtacagaagagaggagaattctatgagaaaaaccaggaaaagtgtatcaactaagaaagaaatatcacaatgcaaaacattgaaagagaagcaagaagactttatcatgcttccaacagtagatttctgtttcaaggaattaatgcagaatgataacatccgcaagaatatcattgcagcactattaaacgttccagccagtgaggtagagaacacgaaacttatgcctacaattcttagaaaagaatcgaaagatgataagtatgggattttagatgtccgggtgaaactgaaagatggagaacagattgactttgagatgcaggtagaagcatttgattgttgggcaaatcgttctgtttattatctgagtaagatgtatacaagtgaaataaaagaaggcgagggatacgattgcttgaagaagtgtatccatgtgagcattcttgcatatgatcattttctagatgataaagagtgttatcggagaattgcattttgtgatacgaaaacaggaaaagagtatacagaccttatggagatgcatatcttagaattgtcgaaacttccgccggaagagaagaatgagacaagtttgttacagtggatgcgctttcttggaggaaaaacaagaaaggattttgaagagatggcaaagaagaattcagaattggaagaagcgtatgacgtattggataaattaagtgcagatgaaaagaaaaggttagaatacgagacaagacaaagagcaatcagggattataatatagggatgttaaccgcagaaagaagagggattgaagccgggcgaaagattggaaggcaagaaggaagagaagagggaagacaagaaggaaggcaagaaggaagaaaagaaggggaaactttgggagtaagcagaattaatcaattaattctcgaattatcaaaacatggacgtacagatgatatcgtgaaagcagcagctgacaaggagtatcaggaaaagttgctgaaggaatttgatttataacagtcagacaaaagagattaaggaaatgatcaaacattcgcgacacactgtcatagttttcgtttgcagaataaaagccacaggtagagattagcacatgccttttgccttccatatcatatctggcttcatgactgccgcttccatatccatcctgccttgtactcataaaaggaagactcataggaagttgtcgatcgatcaaattctttaagataccaggaacattaaaataatacagcggaaaagaccacaaaataagatcggattccatcagtttttcaataactgtttgcatatcatcctaaccatctgtctcagattttttaatccaaataaagtgtatcattctgaaaaaggcatttcaattagaacaaaaataaacagaatcaaaagtagttgacatttcgtattacgaaagtataatagaataggtgagagaaaggagattacctatggctaagatgggacgtccgaagtcagacgtgatcaaagataaaattgtgacaatccgaatgtctgcggaggaacatcagaaacttagggactattctgagaagcatcaacagacgataacggaaacccttaaagagggagttgacttattatataagactcgtgattaaggtgcattttttatgaagaacattacgaaatcaagagattatagtagtgaaatgatagaacgaaaaggagaagtgctatggcattaaagaaaaaaccggtaacaggaatgaaagatattcttcctgcagagatggagatcagagattatgtgatcggtctgatcaaagagacatatagaagctttggattctcatccattgagactccatgtgtagagcatatcgagaacctgtgcagtaagcaggggggagataatgagaagctgatcttcaagatcttaaagcgtggagagaagctgagacttgcagaggcgaaagaagaagctgatcttgtagacggaggactccgctatgacctgacacttccactgtccagatattatgcaaatcattctaatgaacttccggcaccgttcaaagcgcttcagatgggaagtgtatggcgtgccgaccgtccgcagagaggacgttaccgccagtttatgcagtgtgatattgacattcttggcgagccatccaaccttgctgagatcgagctgatccttgctacaacatctctgcttggaaaactggatttcaataactttacaatccgtatcaatgaccgccgtttcctgaaagcaatggcagcttacagcggatttgaagaaaaggattatgacagtgtatttattacactggataagatggacaagattggtcttgatggtgttgcagcagagatgaaggaaaatggatatgcagaggaatctgttgagaaatatcttcagctcttcaaggagattacaggagatgtagaaggtgtgcgcgcatgtaaggagaaacttcagggattccttccggaagatgcggcagactctcttgaaatgatcatcacaagcgtagaaagtgcgaaggaagcagatttccgtatgctgtttgatccgacactggtacgtggaatgtcttattatacaggaactatttttgagatttctatggatgagttcggcggatctgtaggtggcggcggacgctacgacaagatgattggtaagtttacaggacaggatacaccggcggttggattctctatcggatttgaacgtattgttatgcttctgatggagcgtggatacaaagttccgacaagcaaagagaagaaggcattcttgatcgagaagaatatgccgaaggaaggcatgctcaaggttcttgatcttgcgaagaaggagcgtgcagcaggtcgtcaggtaatgatcatgaacatgaagaagaacaagaagttccagaaggagcagcttgcagaacagggatacacagatattacagagtgctacagagattctgttgataacttatagaaaaaagggaaaggaagtaaataaccatggctgaatcaatgcaggggcttaagagaacacaccgttgtggtgaactctcagcagccaatgttggggaaactgtaactatcatgggatgggtacagaagaacagaaataaaggaggacttgtatttacagacgtaagagaccgttctggaattatacaggttgtatgtgaagaaggaactacagatgcagcaatcattgagaaagcagcatctttacgtgcagagtatgtagttgctgttgtcggaaaagttgagagacgttccggcgcagtgaatgataagatcgcaacaggtgagatcgaggtgatccctagtgaacttcgtgtactttctgagtcacagacacctccgttcccaattgaagaaaactcaaagacaaaggaagacatccgtctgaaatatcgttaccttgaccttagaagaccggatctgcagagaaatcttcgtatgaagagtcaggttatgacactgacacgtcagttcttctcagatgaaggattccttgaagtagagactccaatgcttggaaagacaactccggaaggcgcgagagattatcttgtaccaagccgtatccatccgggatctttctacggacttccacagtctccgcagctttataaacagcttctgatgtgttcaggcgtagaccgttacatccagattgcaagatgtttccgtgatgaggatcttcgtgcggacagacagccggaattcacacagatcgatatggagctttctttcgttgacgtagatgatgttatcgaagtaaatgaaaagtatcttaagaaactttttaaagaagttcttgatgtagacgtacagcttccaatccagagaatgacatggcaggaagcaatgaaccgttatggctctgataaaccggatcttcgtttcggaatggaactcaaagatgtatctgatgtagtaaaagactgtggatttgcagtatttacaggcgcgcttgagaatggcggaagcgttcgtggtatcaatgccaaaggacagggcagcatgccgagaaagaagatcgacaagctgacagcatttgttaaagattacggtgctaagggcttggcttatattgcgcttcaggaagatggaacagtgaagtcttcatttgcaaaattcatgacagacgagcagatggatgcacttgtaaaggcaatggatggagagccgggagacttgcttctctttgctgctgacaagaacaaagtggtatgggattctcttggagcactccgtgttgagctcgcaaaacagcttgagcttcttgataagaatgagtatcgttttgtatggatcacagagttcccgctgcttgagtggagcgaggagcagaatcgtttcgttgcaatgcatcatccattcacaatgccgatggaagaagatatccagtatatcgagtctgatccgggaagagttcgtgcgaaagcatacgatatcgttctgaacggaaatgagattggtggcggtagtgtcagaatcttccaggatgatatccaggaaatgatgttcaaggcacttggctttacaaaagagcaggcttacagccagttcggattccttctggatgcgtttaaatacggagttccgccgcacgcaggacttgcttacggtcttgaccgtcttgttatgcttatggcaaaacaggacagcatccgtgacgtaatcgcattcccgaagatcaaggatgcatcatgtctgatgacagaggctccgacaccggcttccgagaagcagctggaagagcttagccttgctgtggaggcacaggaagaaacaaccgaagaatagatggtgatatttcagcaggaaaagctataagcacagcttttcctgctgtttttaggtgtgttttgatttaatttttcagacaatattgcaagaaatttgaaatataataaaatttctcttgacaaatagaaagaggacaactaaaataagacacatcaaaagcaaaaaccgatgagaaagagaagtaggttttagaagagatcacagagagcagcaggtggtgggattgctgtatggattctgattctgaatggactttcgagggcggcctgaaatgaaaagagtaggaaccgccgggaaccgaacccgttatcaatcaggagcgtatgttagtacgtgagaaagtggacgaacgtcaatttgagtggtaccgcgataataatgaattttattaccgtctcaagcaataagcttgaggcggttttttgtatatcagaaaagttgatttataaaaagaaatccacagtttattgacaagaatcccaaatcggctcctttgcttttgcagaaatattaaaaagaaaaaaggagacaacaattatgaaaaagagagtattagcagttattttaggagcagtaatgacaatgagccttgcagcatgtggatcatctgatgcaggaaagacatcttctgatgatggagagaagagttacacaatcggtatttcccagtttgcagagcatggttctcttgataattgccgtgagggatttttagaaggactgaaagaagaaggaatcgaggaaggcaagaacctgacagtagaagtgaagaatgcagcagcagatcagggaacagcaaaacagatcagtgatggatttgtttcagacaaagtggatcttgtatgtgcaatcgcaacaccaagtgcacaggcagcttacaattcagcaatgaactctgatatcccggttgtatacacagcagttacagacccggttgcagcaaagcttgcgaaagaggatggaacacctgcaggaaatgtaacaggaacaagtgatgaacttccaatcaaagctcagctcgagatgattcgtgagatgcttccggatgcaaagaacatcggaatcctttacacaacaagcgaagcaaactctgtatccgctcttgcaaaatataaagagcttgccggagactatggattcacgatcgttgacaaaggaatcgcacagacagccgatatctctcttgcaacagatgaactgctgacagaggttgattgcctgacaaatcttacagataacacagtagttgcttcccttgcaacaatccttgataaagcaaacaagcagaacattccggtgttcggaagtgagatcgagcaggtgaaaatcggatgtctggcagctgaaggacttgactatgtagcacttggaaaacagacaggtaagatggcagcagagattctgaaaggtgagaagaaagcatctgatatgaactttgagacaatcacagaaccaggtttctatgtaaatgaaaaagttgctgaaaaccttggggttacagttccgcaggatcttgcagatgaagcagtagagagctttacagagattataaaatagtattgaaacagagaggttaacacattatggggatttatattacgattttagaacagggactgatctacggaatcctggcgcttggggtatacatcacttataagatcctggatttcccggatctgacagtagatggaagctttccgctgggagccgcactgacagcgacgatgatcacaagaggcgttcatccaatcctgacactgccggcatcatttctgatcggtgtgcttgccggagtctgcacaggcctgattcatgtaaaattcaaggtaagagatctcttatccggaattatcatgatgacagcattgtggacgatcaacttaagactggcaggaacagcaaatgtcccaatctttggagaggacagtatctttgataatgcatccgtaaatggaatcttccatgatggcctttcaaattacaaagtacttgtgatcgtgcttgtgatcgcagtgatcagtaaagtattattagacctttatatgaagacaaaatcaggttttctgctccgcgcagtaggagataatgacgtattggtcacatctcttgcaaaagatcagggaaatgtgaaaatcttaggacttgcaattgcgaacggacttgttgctctttcaggaagtattttctgtcaggagcagcgcgtatttgaaatttcaagcggaaccggtgcaatcgtaatcggtttggcaagtgttattatcggaacaagcttatttaaaaatatatcttttatgaaagcaacaacagcagtgttgatcggatctgtgatctataaagcctgtgtcgcagcagcgttgaagttctttgaaccacaggacatgaaactgatcacagcggtattattccttttgatcctggtaatcggtggagaacgcagaaagaaggtgaagaagaatgctcgagcttagaaatattgaaaaatactacaatccgggaaccatcaatgagatgtgcctgtttgacaaattcaatttgacggtagacaaaggggaattcgtctctgtagtcggaagtaatggttcgggtaagacttctatgctgaacatcctctgtggaagtattccggtagacggcggacagatcctgatgaacggggaagatatcacaacgaagaaagaattcaagagaaatcagaagattggacgtgtttatcagaacccggcaatgggaacctgtccgacaatgacgattcttgaaaatatgtctcttgcagacaataaaggaaaattctttggtcttggttcaggaatcaataaggcgcgtaaagagtactatcgtgagatcttgagtcagctcggacttggattagaaaataaaatggatgtaaaagtcggttcactttccggtggacagcgtcaggcaatcgcccttctgatgtctacgatgacgccgattgatttcctgattcttgatgagcatacagcggcgttggatccgaaaacagcagaactgatcatggaattgacaggaaagatcgtagaagagaaaaagcttacaacgatcatggtcacgcataatcttcgctatgcagtggaatacggaaaccgcctgctgatgatgcatcagggtggagttgtgatggatctcaaaggaaaagaaaaagaagaacttcaggtagaagatatactgagtaaatttaatgaaatcagtatagagtgtggaaattaaatgttaaaaaacgtaaagaaaggattgatagctgtcatttagacaactgtcaatcctttttttaaagctttttattcatcccatccttcgtagaaacgaatatttacggagatgtttcttacaatctcatcttcagcaagttcaatatcttctagatcagatacatgtgggaagattggatcctcttcttctaattcaacagtgatccatgttcttgcagcttcgtttgcattgtcgatcgcgtcgtccaaagtttctccggatgcctcgcagcattcgagatccgggaaatgtgcgttatagcctccatcttccttcttacggaatacggctggatatataaatttcatttcataattcctcctggtttctaaaacataatctgttacttagtatagttgataaaaaataaaatggcaagaggggaacgttttagatatgaaaaaagcacttaaatctttaaaaatctaagtgcttcagagcgacagacggggttcgaacccgcgaccccaaccttggcaaggttgtactctaccaactgagccactgtcgcataggattgttccaagtgaacaatcaatatgaaattaagatgttgagagcgacagacggggttcgaacccgcgaccccaaccttggcaaggttgtactctaccaactgagccactgtcgcataacttattgttccgacgaacaataaatatgttactacaagatcattaaaatgtcaacagaaaataataaaaaaattagagaaaatgaaaaaattaagtctaagacttcctagtgaaagaaaatcatgctatactgtggttactgtgacttaaaacaacagatgtgaaaagaaggatgttgtaaatctttgttctataataaaagaacaaattacacagggataaaagatgaaagaggtgtccataatgaaaacagtaaaggtagcaattctcggacttggaacagtaggatccggtgtctataaactgattcagaagcgtgctgatgtgatggagaagacaatcggtgctcagatggaagtgaagaagattcttgttcgcaatataaataagaagagagagggtgtagacgcttctcttttgacagataattggaacgatattgttgaagatgatgagattcagatcgtaattgaagttatgggcggtatggagccggcgaagacgatgatccttgaggcactcagagctggtaagaatgtagtttctgcgaataaggacctgattgcagaggaaggacatgtacttcttgcaacagcagaggagcatcatgttgatttcttgtttgaggcagcagttgccggagcaattccgatcattcgtccgatgaagcagtgcctggctgtaaatgacatctctgaagttgtcggtatcgtgaatggtactacaaactacattttgacaaagatgacagaagaaggaatggatttctcagatgcacttgagaaggctcaggagcttggatttgctgaggctgacccgacatcagatgtagaaggtcttgatgcgggacgtaaggtagcgatcatggcttctatcgcgttccattccagagtagtatttcctaacgtatttacagaaggaatcacaaagatcacagcgaaagatatcgagtatgcgaaagaatttgacagtgtgatcaaactgcttggtgtagcacataacacagagagtggaattgaagtaggtgtttacccaatgatgatccataaggatcacccacttgcatctgtaagagattcctttaatgcagtttttgttcatggagatgcagcagatgatgcaatgttctatggtcgtggtgcaggagagttcccgacagccagtgcagttatgggagatgtgatcgatgttgcgagaaatatggcatatggctgcaatggaagaatcagctgtacatgttataagaaccttccggtaaaagacatcggggatgtgaagaataagttctttatccgtatgcaggtgacaaatgaaccaggtgttcttgcagcagttgcagaggtgtttggtaatcataaggttagtatcacaagagttgttcaggaacatacacagccacagcaggcagagcttgttattgtaactgagagtgtgaaagagaaatatatgaagcacgccctggaagagcttctggcactgcctagcattctagaagtgagcagcattatccgcgagtattaatcagaagaaggagaaaaatagttgagttacgcagataaagtatttattgatatgtgcagagacattatagagaatggaacaagcacagagggtgagaaggtacgcccaagatgggaggacggaacaccggcatataccattaagaaatttggagtggtcaaccgctatgacttgtctaaggaatttccggcactgactcttagaagaaccgggatcaagagctgtgtggatgagatgctctggatctggcagaagaagtcgaataatattaatgatctgaacagtcatatctgggacagttgggctgatgaggatggttcgatcggaaaagcctatggttatcagatgcaggtgaagcatcagtataaagaaggcatgatggatcaggtagaccgcgtgatttatgatttgaagaataatccgtatagccgtcgtattatgacaaatatttacgtgcatcaggatcttcatgagatgaatctgtatccatgtgcatatagtatgacatttaatgtgacaaaggaaaaagacagtgacaagcttacactaaatggaattcttaaccagcgttctcaggatgtccttgcggcaaataactggaatgtgtgtcagtatgcggtattgcttcatatgttggcgcaggtatgtgacatgaaggtcggagagtttgttcatgtgatcgcagatgcacatatttatgaccgacatgttccgatgattgaggaactgatctcaagagaaccgcttccggcaccgaagttctggctgaacccggaagtgaaagacttctatgatttcacaccggatgatgtgaaactggaaggatatgagacacatccgcagattaagaatataccaatcgctgtgtaaaggagaagaagtatgcaggcaatcgtagcaacagataataattggggaatcggttaccagaacagactgctggtgagcattccatcagatatgaagttctttcgccagaaaacaacaggaaatgttgtagttatgggacgaaagacactggaaagtttcccaaacggacttcctttgaagaatagagtgaatattgttcttacgaagaataaaaattatcaggtgaaagatgcagtgatcgttcactcagaggaagaacttttagaagaattgaagaagtatccgagtgagaagatttatgtgctcggtggcgagagcatttacaagatgatgcttccatattgtgatactgtatatgtaacaaagatagaccgtgaattccaggcagacacttatttcccgaatctggatcatatggaagattggaagatgacggaagaaggagaagaacagacttgttttgatctggaatttgcttttacaaaatatgagcgctgctaaaacagatgctgtgaaagtgtaaaagagtaaaagtgagaagatgaatttgaagatgaagaagagaagagtaagagactttctgcttgcaggaagtcttattcttggaatgatgctgactgggtgtggaatgtccgggcagcagacagagcaaaacgggggaaaagaacagaataaagtagaaaatgaaaagattagtgttgtagcgacaatctttccgcagtatgattttgtgcgtcagatcgcgggagagaatgtggaacttaagatgcttttaaaaccgggtgaggagacacattcttatgagccgacgccacaggatattattgcgatccagaacagtgatctgtttatctatgtgggcggcgagaatgatgcctgggtagaagaccttcttgaatcaatgccggacaatgggagaaagactctgaagctggtggattgtgttgacacagtggaagaggaacatgtggaaggaatgaaagaagagcgtggtcatgatcatgacgaggatgatgcggagcatgaagagcacgaagtggagcatgaagaggacgaagcagatcatgaagagcatggacaggaagaaacacattctgtacatgaaattgatgaacatgtgtggacatctccgttaaatgcggtgaagatcgttgagcagatcaaagaagagctctgcgagattgattcggaaaatgcatctgattatgaagaaaatgcagaagcttatgtagcacaattgaaagaattggatcaggaatttcaggatgtggtggatcattcaaaacgaaagctgatgattttcggagacagatttccgttccgttattttgcagaagcgtatggtctggattattatgcagcattttcaggatgtgcttcggacacagagccaagcgcagctacaatggcgtttttaatcaataaagtacaggatgagaatattaaaacagtattaaaaatggaacttagcaacgaaaatattgcgaaagctattgcagaagcaacaaatgctgatgtaaaagaattttatagctgtcataatctgacagcagagcagtttgcagatggagagacatatctgagccttatggagaaaaatgttgaaacattaagggaggtgctgaactgatggcgttgatcaaatgtgaaaatgtatccattggatacgaaggacagatggttgtacatgacttgaattttgagattaatcagggagactacctctgtattgtcggagaaaatggttccggaaaaagtacacttgtaaagagtcttttgggactgaagaatgtggacaaaggcaagattgtttttgatgatggattaaaacagacagagattggatatcttccacagcagacagatgtgaagaaagattttccggccagtgtttatgaagtggttctttccggccggttgaacagcagagggatgaaaccgttttatacagcagaagataagaagcaggcgtgggagaagatggacatgcttggaatccgtgatctcgcaaaacaatgtttccgagatctgtccggtggacaaagacagcgagttctgcttgcaagagcattgtgtgcgaccaagaaactcttgcttcttgacgaaccggtcacaggattggatccaattgtgacagcagaattctatcaattgatcagtcgaatcaataaggaatccgggattgcagttgttatggtttcgcatgatatcgagagtgctgtagaatatgcaagtcatatccttcatttacaggaaacagtgctgtactttggaaaagcagatggatacgagaagagtcgtgccggcaagacattcttaggaggtgagacacatgtttgatacagtgattgagatgttgtcttatccttttatgacaagagcgttccttattggatcactggttgcattatgttctgcattactgggcgtcagccttgtattgaaacggtattcgatgattggggatggactttctcatgtgggatttggtgccatggcgattgcggctgcgatgaatgccgctccgcttacagtagcaatcccggttgttattgtagcagcgattctgcttcttcgaatcagcgggaatgcaaagatcaaaggagatgcggcaattgcactgatttctacaacgtcacttgcagttggtgtgatggtgatctcattgacaacaggaatgaatacggatgtatataattatatgtttggaagcatccttgcgatgagcgcggaggatgtgaagttaagccttgtactttctgtttgtgtactcatcctgtttattgttttttatcataagatatttgcgattacatttgatgagacatttgcccgtgcaacaggtgtgaaggcaggtgtttacaatacgttgattgctgtacttacagcagtaacgattgtgcttggaatgcgtatgatgggagcattattgatctcgagcctgattattttcccggcattgacatcaatgagagtgtgcaggacatttaaaagtgttataataaacgcagcagtaatctctgtggtgtgtctgattgcaggagtaactctttcatatgttgcggcaaccccggcgggagccagtgttgttcttgccaatcttgtaatgatggttctgtatacagtagttggagctgtgaaaaatcatatgcgatagattaaataagatcaagaactcgacgttgacaagatattttttaacacttataattaatttacgctttacgcaaatacgaagacagggagtagtacacagcttgtggatgtacagaggcttatctctgaattcaggtgatgacatggatagatctggctgttgacacaggtactgtgaacggtaaatactggatattcgccctgggcatgaaggtcatgcttggggctttcttttttgaaaagggaggtatatagattgaaacagatttcaggaaacaaattacttgtaagagcgctgaaggaagaaggcgtggataccattttcggctatccgggagcatgtacgattgatatcagtgatgaattgtacaagcaggatgatattcggatcattctgccaagacatgagcaggcactggttcatgaggcggatgcttatgccagaacaacgggtaaggtaggtgtctgtcttgttacaagcggaccgggagctacaaaccttgttacagggcttgcaacagcgaattatgacagtgtacctctcgtatgttttacaggtcaggtagcaagaccattgatcggaaatgatgcattccaggaggttgatattgtgggaattacacgcagtattacgaaatacggtgttattgtacgaaacagagaggatcttggaagaatcattaaagaagccttttatatcgcgagaacaggaagaccgggaccggtactgatcgatcttccaaaagatgtgatggcagaacttggaagtgcggattatccggatacagtcaatatccgtggctataagccaaatacgaatgtgcatatgggacagttaaaacgtgcgcttaagatgctgaaaaaggcaaagaagccgttattccttgcaggaggcggtgtgaatatcgcccgtgcgaatgaggtgtttacagaagttgtagagaagacagaagttccggttgttacaacgatcatgggacgcggtgcggttccgacagatcacccgctttatataggaaaccttggaatgcacggagcatatgcttcgaacatggcagtcagcgaatgcgatcttttattctcgatcggaacacgttttaatgaccgtattacgggtaagctgcatgaatttgcaccgaatgcacagatcgttcatattgatatcgatacagcatctatttcaagaaatattcatgttgatgtgccgatcgttgcggatgcgcttgaggcagttacgaagatgaatgaatatgtagagcactgtgagacaaagaagtggagaaaacagatcgcagagtggaaggaagaacatcctttgacaatgaagaaccgcgtggatatgggaccgcaggatattattgaagagatcaaccgtcagtttgacaatgcaatcattgcaacagatgtaggacagcatcagatgttcacaacacagtatattgagattacaaagaacaagcagctgatcacttccggtggacttggaacaatgggatatggtttcccggctgcgatcggagcgaagcttggtaatccggataaggacgttattgcaatctccggagacggtggtatgcagatgaacattcaggaatttgctacagcagtattggaagaacttccattgattctctgtgtatttaataatgaatatcttggtatggtacgtcagtggcagaagctgttctatggaaaacgttacagtatgacgaacctgaaatcaggagcacttttccgcagaacaaacgggcaggagatgccggagtacacaccggattttgtgaagcttgcagagagctacggagccaaaggaatccgtgtcatgaagaaagaagatatcgcagctgcatttgaagaggcgaagaagaatacaaagacaccgacactgatcgagttcgttatcaatccggaagaacttgtatatccgatggttcagccgggcggaacacttgaagatttgatcatggattgttaatcgattagaacagaaaatataggttagcgaggaagagatatggataataatatgaaaaagagatggatttctctctatgtagaaaaccaggttggtgtactttcgaagatttccggtttattttccgggaaatgttataacctggacagtctgacagttggaacaacagaagacccgaccgtttccagaatgacaattgcaacagtcagcgatgatgagacatttgagcagatcaagaagcagcttaaccgtatgattgaagtaattaaagtaattgattttacagacgtatttgtaagaatgaaagagatcctttatgtaaaagtcttaaaatgtacaccggaagataaagttgagatctttcagatcgcagagacatttaaggcgaaagtaatcgattacggaaaagacagtcttttggttgagtttgtacagactgcgacaaagaatgatgcagttgtgaagttgatgaaggaagaatttaagagcattgaagttgtccgaggcggaagcgttggaatcgagtcgatcagcatgatggaaagataattaataaaaagaaataaaaaagtatcagaagcaaatttaaaagtttctgatacttttttgtttatatgttttttgattttgtatccatttgtgatttgctattacaaacggaataatactgtcgcaatattaaagtagatcagaattgagaaggtatccaccagtgttgtgatcagtggagatgccatgatcgcagggtcgagatttactttcttggcaagaagtgggaggatacatccaaccagctttgccatgatcacggttcccatcagggagcaggcaatcacaactgcaagtcctggattatgatactgtataaagatacgcacaccgttggcaacagcaagaaaagcaccgacgatcaaagagatacggaattctttgaacatgactttgaaaagatctgtaaaacggatctcatccagtgcgattccacggatgatcagtgttgcactctgggaaccacagtttccaccggtatccatcagcattgggatgaaggatacaagaagagggatggctgcgaatgcattttcatatcttgtaatgatcgttcctgtgatgatggaagtgaacatcaagatcaaaagccatgggatacggttctttgcatgctgaagaacggatgtttcaaaatatgtcttctcactagggttgatggcagccatctttgtgatatcctctgtggcctcatctaccataacatccatagcatcgtcgaatgtaacaataccaaccatgcggccgtccaggtcaataacagggagcgcaagcaggtcatactttgtgaatagctgtgcaacctgttcctggtcagcgtgtgtatacacggagatgatctctgtctccatcaggtctttgatcggaacatcgtcatctgttgtcatcaaatcttttgcacttacgataccgaccagttttctgcgttctgtgatatagcaggtgtaaatggtctctttatggattccggtcttcttgatatgtgccatcgcctgtccgacagtcatttcctcacgcaggtctacatattccgttgtcatgatacttccggcactgtcttccggatagttcagcagctggttgatcatgctacggtctgacgcgctgacggtagccagaattcgctttacaaggtttgccgggagttcttccagcatatcgaccgtatcgtccatatagaggtcgtctaagagctctttcagctctttctcagtaaacattgttaccagataagtctgcatggaagtgtccatattggaaaatacttcagcagctttatcttttggaataagacgaaaagcaagagccagttctttatcacttaaagttgagagaagagaggctatgtccacttcgttcattacatcgagaatacttctgacagctttgaattcgcgctgcgccagaagctttataaaaatatctttgtccatgataattacctcgcattattttatttttgtctattgagccacatatgtggtaactactggcaccagagtccataacctcacctcccttgttcgtattttatgagaaacaaaaaactccatcattgcctgaacaatgacggagtcgtattgacttcttataaaatgcatcgttcaagctttagtatcacagggcatatcaattgcattaggttgtgccttctcgacacagcctgctgaccaactaatcgtgtctccacaatctcgcggcagcaatctccgggtcctatcgaatgcttaagcatgtcaaatatcccaatccctgtggtaacctcacctaccgaaatgatgtagttgtgttgtttttaccatagattattgtatcccacgcagcggggcgtgtcaaggaaaaatgcgataaatctgtgtaaattggtgtaaaaagaaagaaaaaagtggaaaaagatgaaaagacaaaaaggatatctgtcagagtaatcattacttctggcagatatcctttttgttttcaatccttgcggatctgatatacaattttcccattcactttttcctcagtgatcattttttgctttaccatatagggaagaattgaatcaagaaattgtcttggatcagtcacattgatttgttcctgcataaatggctgtttcgccgtcagatctttcacatatggttcaagagctgtgcgggtcataggaccatttttcttcaatgtctttttgactttggagattcctttggaactgagcatattagcaagatcgcttccctgtctcatcgtacgccacaatccccatccgtagacgatcattgtagcaactgcaaagagaagtacataaggaagatatttcagaatcgtatgcatcatttccgtttctctcctttccagtagattaggtgattatcatgaaggatctcaaggtatttgatcagtcttgtcagcggctgttccatagaaggaaactctgcttcaagctctttggagattgcatgtacatcctttttatcatcgatggagttccacacaaaagttccaagcttgtctaacttgatttcacttacacggggacgacggaagaagcgctgagccaacttgtgataaaatcccttccattcgataaggacggtaataataccgtcctcacctgtttcatattcaatttccggattcttctccgggataaagtcaagatagtttttactgtctttctttttcattgaattatttttccttatcagctttcatacatacaacgtacagaagtactagtaatgcaatgtaaagcaccagactgccaacctgtggtaagtggaatggcagaatgatcttagaatcaatcttaactactgcaaatacagcaagaaggataccgatgataccttctccggcgatcataccggatgtaaagagaagacctctgtctgtacgtgcttttttctctgcctctgtaccttttttcttctcaacgaagatacgtacaataccaccagccatgataccagcactcagagagaatggaaggtacataccaactgcgaatggcataaccggcatcttaagaatctcaacaacaattgcaataaatacaccgatcaggatcatagcccatggaagttcctcattcatgataccttcaacgagcatcttcatcattgtagcctgagctgccggaatcttttctgttccgtatccccaagcctcattcagaaggtaaagaacgaatccgattgctgctgaagaagcaacaacaccgatgatctcaccaacctgctgtttggaaggtgtagcacctacgatgaatcctgtctttaagtcctgagaagcatctcctgcgattgctgcaacgatacagatgataccaccgatagagatggctccaaccatacctgtaagtcctgtagtacctgttactttcaggattactgtagcaaagagaagagtagcgattgtcatacctgataccgggttgttagaagatccgatcagtccaaccatacgagaagatacagttgcaaagaagaatccgaatacaacgatgatcagggcaccaaccaggttaaccgggaagatcggaaggatccagatcagaacagcgatcacaaggataactccgatcagtaatgggaatggaagatcctgctctgtacgaagctgttttccagatcctgcattctttttcatacttccaatggcctgcttaaatgttcttacgatcagaggaaggctcttaatcagactgatgataccaccagttgcaacagctccggctccgatgtatttgatgtaattagcccaaagagcagaaggaccatccacaagtaattcatttacagtaactgaagcagggaagattgtagcatctccaccgaacagtgcgatcattggcataagtacgaaccagctgagtgtaccaccggcgaacatgtagctggagatcttcggtccacagatatatcctacaccaccaagtgccggaagaacctgcataccaatctgtgctccgctgtagttcttgaatgcgtgtccaatctcacttgggaagagctgcgttccgtctgcaaggaatttgtaaacggctgcgataccaagtcctgcgaatactgtaccagccttagatccaccttcttctccggccagaagaacttctgcacaagcagttccctctgggaaaggaagtgttccgtgctcttcaacgataagagcctgacgaagcggtaccatgaagcatactccgagtattccgccaaacagggcaatcagagcgatggaaaggatgcttgggaaagcaatctttccttcttcagcccaaaggaataatgcaggaagtgtgaagatagctcctgctgcaacagactctccggcagaaccgattgtctgtaccatgttgttctcgagaatagaatccttacggagaatcacacgaatgattcccatagaaattacggctgccgggatggaagcggaaactgtcataccaacgagaagtccgaggtatgcgttagcagctccaaatacgattgccagaaggataccaatcaagagtgctgtcaccgtaaactcaggaacgactttgtccgctggaatatacggcttgaattctttcttgttgttgtccattttttcaatgtcctttcttttgttttctatgctatcctgctgtccccacaacagatagcggcgccttttgttaatataaaaaattttttattaacacagctttatgattatagcatattaaagtgctaaaaggaagaataaaacgcaaaaatgttatggaaatatgttgtaaatgtaaaacttttataaaaaatggtagattttggaacaaaaaagagaggggaatgagaaaagatttcaaaattcttgataaaaataggagcttttagaaaaatgataagaaattgagaaatacaatagaatgtagaaatgtttgatgtcaaaaaagagaatttgtggtaaaataaaatggattatgtagaaacagaaaagaacggaggtcaacagttggaagcttatacagggtttgcggcggtctacgacattttcatggataatgtaccttacgaagagtggggcgaatacattcacagtcttttaaaagaccgtggaatagaggatggcattcttttggatctgggctgtggcacaggaacaatgacagagaagcttgcggattatggatatgacatgatcggtgtggataattcagaagatatgctggagcttgcgatggagaaacgtatggagtcagggaaggacattctttatctgcttcaggatatgcgtgagttcgaattatatggaacagtaagggcaattgtcagtgtctgtgattcagtcaactatattacagaaccggaggaactggaagaagtattccgtctggtgaataactacctggatcccaagggagtctttttgtttgattttaataccgtatataagtataaagaagttatgggagatacggtgattgcagaagacagaggggaatgtagttttatctgggataatttctattatgaagaagaacggatcaatgagtatgatctgactctgttcattcaggaagacgcaagtgaagatttgtatcggagatatcaggagacacattaccagagagggtataccttagaagagatgaaagagctggtagaacgttcggggcttgtttttgaggcggcatatgacgcagttacacatgaggaaccgacagagaagagcgagagaatctatatcgttgccagagaatccgggaaatgaattggatacaattcttgaatagataagaaagacgaggagaataagacatgaatgattatattgtaagagcaacagcaggaaatgcacagatccgtgcatttgcggcagtgacaacaaacctggttgaggaggcaagagagcatcacggaacaagtccggttgcgacagcagcgctgggaagactccttacaggtggagtgatgatgggaagcatgatgaagaatgatacagacatgctgacaatccagattcagtgttccggtcagatcgaaggtctgactgtgacagcggacagcaagggaaatgtaaaaggatatgcatttaacccagatgttatgcttccggcgaagaacggaaagcttgatgtaggtggagcacttggacagggcgtcatgacaatcatcaaagatatgggactcaaggagccatattccggacagacgattctgcagacaggagagattgcagaggatcttacttattattttgcaacatctgaacaggtaccatcttctgtcggacttggagttctgatgaacaaagataatacagtgaaatgcgccggtggatttatcgtacaggttatgccttttatcgaagatgaagtacttaataagctggaggcaaacattcagaagatccagtctgtaacatccatgctggataacggacatacaccggagcagatgcttgagcaggttcttgaaggacttaatctggaaattacagatacaatgccggcacagttctattgcaactgctctaagaagagaatcgagaaagcaatcatcagtatcggaaagaaagagattcaggaaatgatcgatgaaggtaaagagattgaagtgaagtgtcatttctgtaatacagcatataagtatacagtagatgaattgaaagaattgttaaaacaggctcgataagtattgccggggcttttgccctgacatcaaatatagaagatggggtgaagatgagatgaaaaatggatttgtgaaggttgcggcagcgacaccggatatccgcgttgcggatgtggaatttaatacacagaatatcattaatgctatggaagaagcacagaaaaatggcgcgaagattcttgtatttccggagctttgtgtgacaggatacacctgtagtgatctgttcgaccacagcgtacttctgaaagcttccagaaaagcattgcttgagattgcagaaaatacaaatgacaaagatatgcttgtatttgtcggagcaccgcttgaagtgaatggaaagctttacaatgtagctgcggcaatgaatcagggcgagatcatcggatttacgacaaagacgttcctgccaaactatggtgaattttatgagatgcgccagtttactccgggaccacagacagtgagagagattacatttgaaggaaagaagattccattcggtccgcagattctcttccaagcagaaggaatggaagaactggtagtggcagccgagatctgcgaggatgtctggtcaccgatcccgccgagtattcaggcggcacttgaaggtgcaacagtgatcgtcaactgttccgcaagtgatgagaccatcggaaaagacacttaccgtcgtgcactgatctccggacagtctgcaagactgatctctggatacatttatgcaaatgccggagaaggggagtcaactacggatcttgtttttggcggacacaatattattgctgaaaacggaaccgttctgaaagaaagcagtagatatgtaaatgaaattatttactcagagctggatcttcagagaattacaggtgagagaagaaagaatacgacattccagccattggatgaagagactttggtacgtattccatttaccgtggaagagacaaagacatttttgacaagaacatttccgaagaagccgttcgttccttctgatgaacagacccgtgcacagcgctgtgaggagatcctgacgatccaggcaatgggactgaagaaacgtctggctcatacgaatgcaagaactgctgttgtcggcatttccggaggtctggattctacacttgcactgcttgtgacagcacgcgcatttgacatgcttggaagagataagaaggatatcattgctgtgacaatgccttgctttggtacaacagacagaacttatcagaatgcctgtgagatgtcgaagaaagtcggagcaactttgattgaggttccgatcgcagatgccgtgaatgttcatttccgtgacatcggacatgatccggaagatcacagtgtaacttatgaaaactgccaggcgagagagcgtacacaggtgctgatggatatcgcaaacaagacttggggaatggttattggaacaggcgatctgtcagagcttgcgcttggatgggcaacttacaatggagatcatatgtccatgtacggagtgaatgcttctgtaccgaagacactggttcgccatcttgtaaaatatgctgcggatgatacaaaagacgaagctcttaagaatgtactttacgatgtacttgatacaccggtaagtcctgagcttctaccgccgaaggacggagatatcgcgcagaagacagaagatcttgtaggaccttacgaactgcatgatttcttcctgtatttcatgcttcgttttggatatgagccgagtaaaattttccgtattgcatgtatgacatttgatggtgaatatgacaaagagaccatttttaaatggctggaaacattctgtagaagatttttctctcagcagttcaagcgttcctgtctgccggatggaccgaaggttggtactgtggcactttctcctagaggggactggagaatgccaagtgatgcctgcgtggcagtatggatgaaagatcttgaggcttgcagagtataatctgtggtgaaaaccagagaaaaggagaacaagataagaaaaatcattgcaggatgtggaaaatcagcatccggcataaatttggggaaagaaaaggagaggataagatgaaactaatcagaacagaggatgcggtcggcagtgtgctttgccacgacattactcagattattccgggagttgtgaaggatgcggtcttccgcaaaggacacgttgtaacagaagaagatgtaccggtactgctttctgtaggaaaagaacacctctatgtatgggagaagcaggaaggcatgcttcatgaaaatgatgcggcagaggtgctgcgtcaggtctgccagggagagcatatgaatgcatctgaggcgaaagaaggaaagatcgaactgactgcacagtgcgacggccttctgaagatcaatcgcgagaaattgaatgaagtaaatgcgctcggtcagatcgtgcttgcatccagacatggcaatttcccggtgaaaaagggagataagattgtaggcatgcgtgttgttccgctagtgatcgaggaagagaatatgaatcatgtgaaagagctctgtggggaagagccgattttcacaattctcccgttccatcagatgaaagtcggaatcgtgacaacaggaagcgaagtttatcatggaaggatcacagataaatttactccggtcgtaaaagcaaaattagaagaggcaggcatggaagtacttggaaatgtactctgtgacgatgactctcagatggtaacagatgcgatcaatgaatggatcgctaagggcgcggaatttgtagtctgtacaggcgggatgagcgtcgatccagatgacagaacaccgttatctatcagaaatgcaactgatgaggtgatcacttacggtgcgccggtacttccgggtgcaatgttcatgctggcttataaaggagagattccggttgcaggtcttccgggatgcgtaatgtatgcaagaagaacaatctttgatctggtgcttccgagaattgcagcaggcgagagattaagtgtagaagatttcacagtgcttggagaaggcggactttgcctgaactgcgaagtatgtacttatccgaattgtggatttggaaaataataagatgaaggagaattggggaatgaattcattttatgtaaatctgcaggctgaacttgcagatgcaaaagaagagctttgggcacagactcggattgatggtgctgaagcaggaaagaaaattctgttaaaaggtgaaccgaaggatacagacagtgtttttgtagatgaacaaggtgaacgtattttccaggagcgtatcagccgtccggcgaagctggtgatctgcggggcagggcatgtatctatgccaatcattcgcatgggaaagatgcttggattccatgttacggtggtagaagaccgtccgaaatttgccgatgatgcgagaagagcagaggctgaccaggtctattgcgaaccatttgaagatggtcttgcaaagatcaaaggagatacagatacatggtttgttattgttacaagaggtcacagatatgacacagactgtctcagaacaatccttggaaagccaagagcttatgttggaatgatggggagtaagagaagaactgcgatcgtaaaagaccagctggaggcagaagggtttgagagagatgtgcttgaagcagttcacacaccaatcggtttgaagattgctgccgagacaccggaagagatcgcggtatctattatggcagaaatcattcagattaaaaacagtcgtgcaaagagcggtggatattccagtgagcttcttgaagaaattctgaaagaagatgagtgtggaaaagtgcttgcgacaattatttccagaaaaggttctgcaccacgtggcgtaggaacaaagatgcttgtatgcggagatggaaggatcatcgatacaattggtggaggatgtgtggaaagtgagattattcagaaagcactcctcatgatccgtacggagcaggaaggattccaggtatgcaaggtagatatgacagcagaggcagcagaggatgaaggtatggtctgtggcggcgttgttgaagtcatgctcgaaagggtaaaataagcgctttgaaaaaagttaaaatgatagtagtaattgagagtggagaataagaaagatggatgatatcaaaattttaaaaggaaatattatctatacaaagacgaaagatgaatttgagatatgcgaacacggttatcttgtgtgtaaagatggaaaagtagaaggaatctatcagacacttccattccgacttggaggggaaccaattgaggatcatggagattgtctgatcattccgggaatgacagatctgcatatacatgcaccgcagtatacattccgcggtacagggatggatctggaacttctggagtggctggagacgaatacatttccggaggaagcaaaatacaaggatgtattgtatgcgaatgaggcgtatgcgaagtttgccaagaacttgaaacatagttcaacaacaagagcatgcgtctttgggacaattcatagaagatcgacacttgttctgatggatcatctggaaagaagcggtctggtcacgatggtcggaaaagtgaatatggacagaaattcaccggatgaacttcgtgaaggtacacaagagtctgcggaagaaacagtcgaatggatgaaggatgtgcagcataaaaagtataaaaatacgctgccgatcctgacacctcgttttattccgagctgtacggatgagcttctagatatgctgaagatggttcagatgcgttaccagattccggtgcagtcacatttatcagagaatttatcagagatcgaatgggtaaaagaactttgtccgtatgcagagttttatggagatgcatatgatcattttggtctgtttggagcagatgcaccgacggttatggcgcattgcgtatacagtacggaagaagaaatccaaagaatgaaagagaacagtgtgtatgtagcacattgtccggaatcaaatgagaatctttcttccggaattgcaccggtaaaacgttatctggaagagggactttctgtaggacttggaagtgatgtcgcagggggatcgacagagaatcttttccgggcaatggcacatgcaattcagatgtcaaagatgcgctggagacttgtcgatcagaaatatctggcattgaagtcagaagaagcattctatatggcaactaagggtggcggatccttcttcggaaaagtcggaagttttgaagaaggatatgaattcgatgctgttgtattagatgacagcagacttgaatcctcccgtcagatgagtgtgaaagatcgtttggaaagaatgatttatcttgctgatgagagagaagtgaaagcaaaatacgtcagaggaaataaaattatataaaaagcaaaagctcaatgcggataaaagcgttgagcttttgttgttagggcatggctctgtttttctacaaaataattgttgtagaaaaacattgaacactatacataaatatgttatcctatttcaaagcatattttctaaaacatctaaattcatataaaggtttcattacaggtagaacatacctgtcaaatcaggaaattcatgcttttaaaatccattatttaaagcagaggttttctgatgaagagagaacttctgtgaaaaatcacataaggaggtctcttagatgaaacaaaagagaaagcaattgccggaagaacagcaaccggcagatggaaaactgcttcagtggcatcctgcattttatgcagacttgcagattgaattcagagaagaaacggaaaaattaaagtttgagcgggagtatctattaagttcaaagccaatggcaattgatgtgttgatcattaaaaagaaggatgcggaaccgatccataaaaatattgggaaaatattccgcaagtataatatcatcgaatataaatcaccatctgattcactttccgtggacgatttctataaggtatatggatatacgaatttttataaagcagatacagggaaggtaaatgaaattccgattcaggagctgacaatcaccttagtgtcaaaacgatatccaagagaactgatccgacatttgaaagaagtacgccactacactattgataatccggaagaagggatttattatgtaattggagatatcttaccgattcagattcttgtaacaaatcggttgtcaccggagaaaaatctctggttatatagtttgacagataccttgaaagacatgtctgttaccagacagcttttagaggattataaaaagaacaaagacgatcagctgtatcaggctgttatggagatcatagtaaaagcaaacgagaatcggctaaaggagggaaaaagagatatgtgtaatgcgttattagaattaatgaaagatgaattagatgaaaaaagagaagaaggggaagctcttggagaaaacaggattaatcaactgattttgaaattgtccgaactgaacagaactgatgaaattctcaaagcagctgcagacagggagtatcagaaaaaattattaaaggagtttggactttaaaaaagtttggaacacatgaaaaaacctcaggttcgggtgttgcagcaccgttctctgaggttttctcattttctattttaggagttttaagtaattgacttattcaatcgatttttcaatattaaaggtggattcttgttccagtctcaccaagaattccgtcttttgctttctcaagcagtgtgatcagtgactgtcttccaggtttggattcagcaaagtcaagagctgcctgtaccttaggaagcatagaaccaggagcgaaatgtccttcttctacatactgttttgcttcatcaactgtcacatcgtcaagccatttctcatccggctttccgtagttcagtgcaactttctctacagcagtcaggatgatgaggaagtctgcgtcgagctctttggcaaggagagcactggcaaagtctttatcaataactgcacttgcacctttcaggtggttgccctggcgcataaccgggattccaccgccgccacaggcaattacaaggtcaccggagtcaaccattgtacggattgtaccgatctcaacgatctcctgcggttttggagaagctacaacacgacggtatccgcgtcctgcatcttctttcatgatataatcatatttctcagccataacatcagcttcttccttagaaaggaatttaccgattggcttggatggtgtctcgaaagccggatcatcagcatctacacgaacctgagtgatcattgtagcaactgggatatcatgaattcctctgttgaacaattcttctctcagggcattctgcaggtcatatccgatgtaagcctggctcattgcaacacatacagaaagtggtgtgtttggctgtttctcatcctcatgtgttaatgcgatcatagcgttgttgatcataccaacctgaggaccattgccgtgtgctacgactacttcgcagccttcctgaatcaggtctacgatcgcgcgtgctgtaatcttaacagcagccatctgctcaggaagagtattgccaagggcatttccgccgagggcaatgacaatacgttttttcttttccattttaggatcctccgtatttactgtaaaggtattgtacaggtctgaaagattcaggcctgtacaataagttactaattaaggtaactgtgaaactatttttgtctgagaaatttaaatttactcaaaaattctggacattcctctttcttcgagcttcttcaggatttcctgtgggttctcgaatttagcaaggaagatcatagctgcgatgatgtatggtttgaagctagcttctttgtaaagtggatctctgtaacgatcgaatacggaagcgtcaacttcaccttcttcacagcttacgcctgagatgtcagctggcagacagtgcatgtaaagagcctttccgtcttttgttgtagccatgagctcttctgtacaagcccagtctttgtgctctgcattctgagcaagaagttctttctcaagagctttgataccttctgtatctccgtttccataaagctctgtacgtttttccatagctgcaaatggagcccagctctttggatatacgatatcagcatctttgaatgcttcagccatgttgttagtcttcttgaaggatccgcctgatttcttagcgttctcttcagcaattttctcaacatcctcgaatacttcgtatccttctggatgagcaagaacaacgtccattccgaaacgtgtcatcagaccgatgattccctgtggaacagaaagtggttttccgtaagatggtgagtaagcccatgtcatagcaagttttttgcctttcaggttctcaactccgccgaactcatggatgatgtgaagcatatcagccatagcctgtgttgggtggtcaatgtcacactgaaggtttacgagtgtaggtttctgctcaagaattccgtctttgtttccttctgttacagcgtcaacaacttcatgcatgtatttgttaccttttccgatgtacatatcatcacggataccgataacgtcagccatgaaggagatcatgttagctgtctcacgaactgtctcaccatgagcaacctgagattttccttcgtcaagatcctgaacctcaagaccaagaaggttacaagcagaagcgaaagagaaacgtgtacgtgtggaattgtcacggaacagagaaattccaagtccgctctcgaatacctttgtggaaatgttgttctctctcatgtaacgaagagcatcagctactgtaaatacagcctcgatctcgtcgtctgttttctcccatgtaaggaagaagtcaccattatacatctctttgaagttgagtgcgttcagtttgtcaatatatccctgtaattttgcgtccatctttaaaatcctcctgattaaaatgaattatttgtttttaggtttattagccaaggcagttccggccggaaattatccggtcagaacgccataggttcaatgaattggttgcgtgatcacacgcaaatgcgttagcaaatactgaattactcagcgtaagacagtggaagtgcagcgtatactgcagcacatgttacgagatcctgtttccatgtcatctcgtttggtgcgtgagcctgagcctcagctccaggtccgaatccgatacatgggattccgtttctacccatgatagaaacaccgtttgtagagaatgtccacttatctgtcagaggacgagcctgacgcatctcaagtgtgtcagcagcaccgattctctgatctccgtaaagtcctgtgtaagctttctcaagagccttagttactttgtgatccttcggaatagcccatgttgggaagtagcactcgatctcgtatacacatcctgtataggacggacgatcatagttgtacatagaaacaacaacgtcatcaccgtatttcttaacgcttggcaggttacggatctcatctaagcagctctcccatgtctctccgaatgtcatacgacggtcaagagatacagcacaggaatctgctactgcacaacggcttggtgatgtgtagaagatctgagatgttgtaactgttccacgtccaaggaaacgagcctcttcgtagtcagggttgaatttcgggttaagcattttaacaagacctttgatctctgtctcgtcagcgtcatcgttctcgttaagagcacgaacatcctgaagaatgtcagccatcttgtagatcgcgttgtctccacgctccggagcagaaccgtgacaggaaactcccttaacatcgatacggatttccatacgtcctctctgtccacggtagataccaccgtctgtaggctctgtagaaactacgaactccggacgaatcttgtcttcgttgatgatgtactgccagcaaagtccgtcacagtcttcttcctgaactgtaccaacaaccattactttgtatccttctggaatgagtccgagatctttcatgatctttgctccgtatacaccagatacgataccgccacactggtcagatactccacgtccaccgatctctgtctctgtctcgtatccatcgtatggatcgaatttccagttatcgatgttaccgatacctactgtatcgatatgtgcgtcaaatgcgatgatcttgtcgccagttcccatgaatcccataacatttccctgtgggtcgatgacaacttcgtcaaatccaactttcttcatctcagcagcgattgtctctacgtgagctttctcatcacagctttctcccggattttttacgatagcacgaaggaaagcagtcatgtctttctcatagccttttgcatactctttgattttgttaagatccattgttcttctccttttgaaataaaatcttgttttggtgttacagtttcttcttattgtattgcgagaaatgattatctctcatttccgtcccagacaattgatttgtatctatccggatcagtgtctccctcagtagagaagagaagtacttttgagttctcatccaatccgaggtgctctctgagcggtttgtactcatccattgtcatgatgcacgcaagtgttccaaacggtgcggctccggattctccggaagtaacaggctgatcacctttgaaaggtgcagcaagcatacgcatacctttggcagcaacccagtcaggtgttgcgataaatgtatcaacgtggtttttcaggatatcccatgaaattgtgttcggctctccacaggcaagaccagccatgattgtaaccatgtctccgtctacgatgcggatagctccgtccttagcacatgctcctttgtaaagacatgcagcaggcgcagcttcaacaacaacaactttcggtggattttccggatagcggttagcgaagaatccctgaactgctccggcaagtgaaccaacaccagcctgaatgaatacatgtgtcggacgctcacatccagcttcatgaagctgatcatcagcctcgttagccattgttccgtatccctgcatgatccatgccggaatctcttcatatccgtcccaggctgtatcctgaaccattacgccgttctctgtcttctctgccatagcgttagccatacgaacacattcgtcgtagttttcctcttcgattgtagctttcgctccttctttcaggatgttgttcagtcttgtttgagtggatcccttcggcataagtactacagctttctgtccaagcttgttcgctgcccatgcaacaccacgtccgtggttaccatctgttgcagtgaagaaagtagcctgtccgaattctttacgcagttcgtcagatgtaagaacgttgtaaggaagttctgaaacatcctttcctgtctgctttgcaatgtagcgagccattgcgaaagatccgccgagtactttaaatgcgttcagtccgaaacgataagactcatcttttacatagacctctttcagtccaaggtatgcagccatgtgatccagttttacaagtggtgtaacactgtactgcgggaagctctcatggaatgcgcgagctttcgctacattctcaagtgacattacctgaagctgagagtcatctgtttttggcatttcgtttactgcccatttgatagtttccattatagtgacctccttaaattaatacgtgtcatttgcccatgtaactgtaaagtgtgaatttcgatatccccaaatacgaagaaactttatcgccggactttgtaataaggaaagcaccggcatgatccagatactggacaacagcaactttatcatctttgttcatcattgcaactggctttccgacctttgcaacggcctgctcgatcaacagatccagaagttcatttacattatgtgtgatctgccgtggcgaatcacctgtaagatccggaagcttgtctttcgtagcgatcaaagactgaattgctgtactcgcagctgtaaaagctgtgatgtcatagtttaatgagaagatgtatgagattgatccgtcatcgtctcttatatagaaggtactcgatttcaggatccgtccatcttctgttttagtaagataggaaagcttatcatgaatcgttgacggatccgactgaagtgtctcaagaacaattcctgaaggaccatctccgatctgtcggttcgatatatgtccgttctcgatgtacacgatcgatttctccagatcttttgtcttcaaatcatgaattgcaatctcacaggaacttccaaattgaattgcaagtccgtgtgcaagctgcttaagaaaatctaaggtatgacgcatatgtccacctgcctttctacatgctttctgtcttcataatcccataatatcataaaaatcacgatagtcaatacctttcctaaaaattttttaggtaacaaaaaacttttttagatttcttgttgcatttagacaatttagatgttattctatgtgtatcagagacattgatgtacgaaatgcacataacaggcagatagcattttaacatcaaagtgtagaaattcataaaaaggagaggttacaattatgttgatcttaggtaatggtagagttgtgacaagaaaccctgaatgtccttatatggaagagggcgcagtagcaattgatggtaaagtaatctgtaaggtgggaccaacagacgagttgaagaaggcttatccagatgcagagtttattgatgcaaaaggcggagtgattatgccggcattcattaatactcatgaacatatctatagttcttttgcaagaggacttgctattaatggatacaatccaacaggattgctcagcattcttgaaggaatgtggtggacactggatagaaacctgacactgaatgatacttatttaagtgctatggctacttatattgattctatcaagaacggtgtaacaacagtatttgaccatcatgcaagctttggagctatcaaaggttccttatttgaaattgagagagcagcgaaggaaacaggaattcgttcctgtctctgttatgaagtttccgacagagatggaaaagacaaggccagagagtctgtaatggagaatgcagaatttattcgtcatgcactgaaggatgacagcggaatgatcgccggaatgatgggtatgcatgcacagttcacaatctcagatgagacaatggaacttgcagcagcaaacaaaccggatgaagttggttatcatattcatgttgcagaaggaattgaagatctgcatcactgcctgaaacattatggaaagagaattgttgaccgtctgatggacttcaatattcttggagagaagacactgcttggacattgtatctacatcaacccacatgagatggatctgatcaaagatacaaacacaatggttgttcataatccggaatccaatatgggaaatgcctgcggatgccctccgacaatggaacttgtacacagaggaatccttacaggacttggaacagatggatatacacatgatatgatggaatccttcaaagtggcaaatattcttcataaacatcacctttgcgatccaaatgcagcatggggagaagttccgacaatgctgtttgagaacaatgcaaagattgcaggacgttatttcgaccagaagctcggagttcttgaagaaggcgcagcagctgatgtgatcattgttaattacaatccgctgacaccaatgaatgagaataacatcaatggtcaccttgtattcggagtaactggacacgatgttgtgacaactgttgcaaacggtaaagtattgatgaaagacagaagactgacagagattgacgaagcgaaagttatggcagactgcagacaggcagcagccgaacttggaaaacgtatcaacagtcgttaggcttagattgacggatactgttcattaatgttaacatatataacagatgtggacagtatctttgatcgcacatttcgtcaaaactaaccggaaaggacaataaaataatgaaagaaaagaaatcagaagcacctcgcagaggaaacgaagaactgtttaagtgggatggtaatccgacatttggtcagatacttccgcttgctgcccagcatgtacttgcagcagttgtaggatgtgttacaccggcaattctggttgcaaatgcagcgaataatgcaggtggaaatgtaaacatgggtctcttgatccagatgtcacttgtatttgcagcattatcaacattccttcagctgtatggaaataagatccatcttggatccggacttccggtcatcatcggtgtaagttttgcttatgttccgacaatgacagcaattgcagcacaggctcaggacgttaacacgatttttggcgcgatgatcgtaggtggtattgtagcaattatcgttggacttactattaagcagatcagaaaggtgttcccaccactggtaatcggaactgttatctttgcgatcggtctgtctctttataagacagccattaactacatggcaggaaactccgcgaacacatatgaagtgatcgtagagcagagaggtcagacagcagcacttgtttatggttcctggcagaactggcttgtatcccttgtaacactggcaatcgtaatcggtctgaaccattacggaaaaggacttttcaaacttgcatctatcctgatcggtctggtctgtggatatgtacttgcattgtgctttggaatggttgatttttcagcactttcaaacgcaggttggttccagcttccacaaccgttcgctttcggtgtgaaattcgatatctcagcgattatcccgctggcgattttgttccttgtcaattccattcaggcaatgggagatttctccgctacaacaagtggtggtatggatcgtcttcctactgaccaggagctcaacggtggtatcatcggttatggtatcagtaatatcgtaagtgcatgtttcggatgtcctccgacagcaacttacagccagaacgtaggtattgttggttctacaaaagttgtagcaagaaaggtattttcactttcagcatttatccttctgattgcaggattgattccgaaattctcagcacttctgagaacaattcctcagtgtgtacttggtggagcagtagcatctgtattcgcaggtatcgcaatgacaggtatcaagcttcttgtaagtgaaggtatgtctacaagaaatacaacagttgcaggattatctattgcaatcggtatgggtgtatccttaagtaacggatgcttaaatcagatgacatcaacaatttacgatggattaggaatgacaatgggacttgagaacttccagtccatcatcaataacacatttgcatcatcaccggttgtactggcgacaatttttgcagttattttgaatctggttcttccgaaagatccaaagccggaggtaaaataaaaggaaacagatctttgagaaaagacaggttcttggggaatgatctgtcagagatttcaaagatttaatcattacggaaggacctgccgatggcaggttttccgtgataaaagaaaaaagagaggtaaaaagtatgagtgaaattatgagacctatgtcatttgaacagcttttaaactggacattgacagagtacaaagagaatggaacagtatttggagagcgtcatccatatcatgcggacagcaaattcaaccgcacaatcttcggacgagatcttgagacaccaatcggaccggcagcaggtccaaacactcagctgacacagaatattatcgcagcttactacacaggaagccgtttcttcgagctgaagacagttcaggtaatggacggagacgagcttgcagcatgcatcaacagaccatgtatcaaggctgatgacgagtgctacaactgtgagtggtctacagagctgtttgttccacaggcaatggaggagtacatcaaagcatggttccttctgaaagtgatctcaaaagaattcggacttggaagcatggacggattccagttcaacatcagtgttggatatgatcttgccggaatcaaatcagagaaggttgacacattcctgaacacaatgcagcatgcacaggattcagagattttcaagcactgcaaggcttatcttcttgagcatgttgacctgttcgagaaagtgacagcagaagatatcgaaagcatttccggtgatatctgtaattctgttacaatctctacacttcacggatgccctccggaagaaattgagaagatcgcaatgtatctgatcacagaaaagggattccatacatttatcaaatgtaacccgacacttcttggatacgagtatgcaagaaagacaatggatgacatgggatacgattatatcgcattcggtgacttccacttcaaagacgacctgcagtacgaggatgctgttccgatgctgaacagactgatcgctgtctgtcaggaaagaaacctggagtttggtgtgaagatcactaacacattcccggttgatgtaaaacagaacgaacttccaagtgaagagatgtatatgtcaggaaaatctctgtatccactttccatctccgtagcaaatatgctggcaagagatttcggtggaaaactgagaatctcctattcaggtggtgctgatttccataacatcgaaggaatcatcgatgcaggaatctggccggtaacaatggctacaacaatcctgaaaccaggcggatatgacagactttgccagattgcaggacttcttgagaaagaaggcgttgtattcaccggtgtcgacgctgccaagacagagaaactggttgaggaagcaaagacaagcccatatcatgtaaaggctgtaaaaccgcttccgtccagaaagatcaacaaacaggttccgctgatcgactgcttcatcgctccttgtaaagaaggatgcccgatccaccaggatatcacaacatacctgcagcttgtagaggctggtaaatatgaagaagctatggatgttatcacagagaagaatccacttccattcattacaggaacaatctgtgcacatgcttgtatgggcaaatgtacacgtaacttctatgagtcaccggtacatatccgtgagatgaagcttgaggcagctcagaatggatacgaagcactgatgaacaagctgacagcacctgcaatcacaaaagaaggtaaggcagcagtgatcggtggaggaccggctggtatggcagctgcttacttcctgcgcagagccggaatggcagttacagtatttgagaagaacgacgctctcggcggtgttgttcgccacgtgattccagagttcagaattccgggaacatctattaataaagatgcagcacttcttgagaagatgggcgttgaagttcgtctgaacacagaagtaaaagatgcagcagcactgaaagcagaaggatttacaacagtgatccttgcagtaggagcttctgagcctggagtattaagacttgagcagggtgaagctaagaatgcactcgagttcctggctgacttcaaggcaaatgacggaaaacttgatatcggtaagaacgttgtagttatcggtggtggtaacacagcaatggatacagcaagagcagcaaaacgtacaacaggcgttgaacatgtatatcttgtatacagaagaacaaaacgctatatgccggcagacgaagaagagctggtaatggcggtagaggacggcgtagaattcatggaactcctttctcctgttaaacttgagaatggaaaactgatctgcgaagttatggttcttggcgatatggatgcttctggaagaagaggcgttgttaagacgggagaactcaaagagatcccggctaatacagtgatcgcagctgttggtgaaaaagttccgactgctctttacgaggcaaatggaatcaacgtaaatgacagaggacgtgctcttgtaaatgaagagacattagagacaaacgtagagaacgtttacgttgttggtgacggacttggcggaccggctacagtagtagaaggtatccgtgatggtctcaaagctgctcaggcagtgatcggagagactcttgtaagagatttcgatgcagagacagatgaagctgctgtatacgagagaaagggtaacctcgaagacgtacgcgaagacagcacagaggctaagagatgtcttaactgtgcaggaatctgtgagaattgtaaggaagtctgcccgaacagagcaaatgtagcaatcaaggttccgggactggataaacatcagatcatccatgtagattacatgtgtaatgagtgtggtaactgtaagagcttctgtccgtacgacagtgctccgtacctggataaattcacattattcatggatgagaacgacatggcagacagcaagaatcagggattcacagtactggataaagatgcagtacactgcaaggttcgtttctgtggagagatcctcgactggacacttggagaagagacaaagattccggaagcacttcagaaagtaatggagactgtttgcaaggactacacatatctgttaagataatagcagaaggtttatgtgagattgctccggtggaaattgagtgagaccagagtgataatatgtgagatagatagctcacaggcatttgcctgtgggctatcttcttttcaaaagacgcagaaatatagaaagaagggatctgtaaaatgataagctatttcagagatgacagactttgtgaagcagactctttcttatcggtagtaaagcctgactatacagaatgtccgatgatagctgctgtcggtgcgggaggaaagacctctacattgagaaggcttgcagaagagtatgcgctgatggggaaaaaggcaattgttcttacaacaactcatatgagagaagagacgactccatggagttgtgtggctgaagaggaagagtggattagtaaagggaaagcgctgcttgaacgagtgaaggaatgccttgaacaatatggacaggcctggattggggcaagagcgaaaaaagggaaaatgagctgcgttccggagttgattctggcagagatagaaagctggaatgtgccattacttgttgaagcggacggagcaaggatgctgccgttaaaagtaccgggagaacaagaacctgtgctcctgccacagacaacatatgtattctctgtctacggaatggatgccttagatcaaaagctggaagaaatctgctttcgaagtgaaaaggcggcagagcttcttggaaaacagccggaagatcaggtgacagaagaggacctgataaagcttgcctgtcatgaacagggcgggcgaaaaggctgtccaaagcaggcagagtatattgttgtactgaataaggcagatacaaaggagcggcgagacagagcgtgtaagattgcaaagtgcttgtatgagaatggaatcaagaatatatttgtgacatcttatatgctgtaataaatattgtagaaaaagtgcagagattattcttgaacgtaaataaattagaaaataacggagaatcatagaagattctcaggaaaatagatgggaagtattgagatgaagatattgattaaaggtgcgggagatctggcaacaggaatcgcatccagattatatggcgcagggcatcagatcatgatgacagatattgctgtgccattgacggtccgcagactagttgcattttccagagcggtttatgaaggtgaggcagttgtagaagatatgacggcgcgcctggcaaagaatcaggaagaagcagaggagattatggaacagggagatatccctgtgatcgttgatccaaaggcagaatgtatacagtggtttcagccggatgtgatcgtggatgccatccttgcaaagagaaatctcggaacaaagatcacagatgcaccatttgtgatcggagtcggacctggatttactgctggagaagattgtaattgtgtagtcgagacaaagagaggacatacactgggtaatgtgatctgggacggaagtgcgatcccgaataccggagttccgggaaatgttgggggatattctattgagcgtctgatcaaagcatccgcagatggggtgatcgaaccgaaggctgtgatcggcgatctggtacgaaaaggacagatcgttgcaattacaggcggagagccggtttatgcgctgatggacggtatcgttcgcggaatgcttcagccaggtgttcaggtgacgaaggggctaaagatcggagatattgatgctcgtgcaaagcaggagcattgccggacaatctcagacaaagcaagggcgatcggcggaggtgtgctcgatgcagtctgcagttatgaaaagagcagaggaaaatacgcattgatcttgctggcggcaggtcagagtgttcggttcggttcagataaactgaaagcagttgtagaaggtgaagcaatgtatgaaagtgcgatcagccggtttgaagcatttcagggattcaagtcttacgtagtgacaggaaaagaagagattacactttcagcagagtcagcaggctgcacggtggtatgcaataaagaaccggagaagggaatctctctttctgtaaagctcggtctgacaaaggcaatcgaggatgcggatgaaaatggaacaccgcttcgaggagtcctgttcagtgtctgcgatcagccaagattaaaaaaatccacgattcagagaatcataaatacagcatttcataatccgggaaagatcgtttgtgcaggagaaggaacaagaaatggcaatccggtcttgtgggataagagattctttgataaacttttggagttagatggagatatcggtggaaagaagatattgaaagaaaacttagattcgctgaaaattgtgccggtacaggcgggagaacttcaggatattgatcgcaaagaagatctcggaacggcataatgatagaattgctggttgcatatagtgtgaacagtaataaaaatagcagtggtgagctgaaaggagaatgcaaatgcgggtaggagcagtgattgcggcagcaggaaaatctggtggatataagagttatgataagatgaagtcggtggatggaatccaggttctgcgtcagatgattttaaatttcaagagagcaggcgtggatgagatcgtgctgatcacaggataccaggcggagcaggtggagaagaaactggcgaagcttggtgcagtattccttcgcagtgaagattatgagaaggaagagatgatcacgtcagcagttcgggggatgaactacctgaaaccgcgctgtgagaaattcttcttctgtccggcaggagtttctcttttcacagaagataccgtacgtgtgttgatgcaaaaagcgaaagaaaatgaaaacgatcatgagaaagtctatgtacctgtctgggaagaacgaaaaggacatccgattctgatggatcgcagtatgatcgatcagtttgcttcttatgaaggtgaaggtggacttaaaggcgccatggatgtgctgaatgtagaacgcattttcgttccggtggaagacaacggtgtagcgatttactccggacagggagaacctttccgtgagattttcaaagagaaggaaaaggagagaagaatccgtccgagagtgaagcttcagttggagaagaatgagaacttcttcggtccgggaattgtattccttctgcgtcagatcgatacacttggttcggtaagagacgcctgtgcaaagacaggaatgtcttacagcaagggctggagcctgatcagaagtgcagagaaagaactcggatataccgtcgtagagcggagtccgggaggcaagcatggcggtgtggccagtgtaagcgaagcagggaaagacatactcagaaaatatgaactgctggaaaaagatgtggtgaaatatgcagagaagagatataaggatatctttgaatcataattcagtcaatgaaaaaagttgcgtaaatcgcaactttttcaagaaaagcgattgttaaaataaaacaaatcagttataataagaccatcatttataaagaaaagacaggaataattacaacatttttatgaacaaggcgcctgtcaggaggagataggatgaaaaagagaattttagcagcaatgatggcagccgtaatggtgttttctatggctggatgtggatccaaagccgacgaaaagacagacgacacagcaaaaacagaagcaactgacaacaaagtcagtgatgaagaagaaacagagatccaggtatttattgcagccagcttgaagaatgtaatggacgaactcgcagcacagtacaacgaagaacatccgaatgtaaagatcacatacaatgcagacagttcaggtacacttctgacacagattgaagaaggatatgagtgtgatatcttcttctcagcagcacagaagcagatggaccagcttgagtccgatggtcttgtggtagacggaacaagagcgaatgttgtaaacaaccaggtagtagttgtgacaagaaaagacagcggaacaaaggtaacaggacttgataacttaagcgaagcagaaagctttgcacttgccggcggaagcgtaccggtaggtaagtatacaagaaccgcacttatgaatatgggtgttcttccgaaggtggatgatccttcagcaatcacaacagaagaagtatcagaagcacttggcggacttgagatcagcgagcaggacaacgtaagcaaggttctttccgcagtagtggaaggatcttgtgaagttggaacaacttactactctgatacatatggattcgaggacgaactcgatattcttcagacagtagggtatgatctgacaggaaatgtaatctatccgatcgcacgtgtagtaaatgatgaggctgatgatgcacagaacgcagcagcagatgatttcatcaagtttgttctgtcagacaatgcaaagaaagtatttgagtcttattacttcgatacaaatgtagaataaagatagtgtgatagtaacggatgtgttactatagaagcagagggttactgttcactcacgtgtcaatcactttgctgattgacacggaggatgcgtgttttgacttgaatgcatctcgccccatcgccaaaggcgatttaaaatggcgagatgcgttgctggtcgcacatcgtgtgaacagtaacagcagaggctgccagaaatgaaaagtttcgaacagcctttttcttatagttgtaaaggagagtgaatgatagaatggatgaaatgatggaaatcctgaagaatctggattggagcccattatttatttcaataaaaacaggaatcgtagctacgatattttccttttttctgggaatctatgcggcacgcaaggttgtgaagacaactccggggaaaaaggctattatagatggaatactgaccttgccaatggtacttccgccgacagtggccggcttctttctgttactgatcttcagcaggagaagaccgtttggaatctttttatttgaaaattttggaatcaaagtagtacagacatggcttggatgtatcattgctgccacagtaatttcatttccactgatgtacagaaatgctcgtgcagcgatggaacagatcgatgtgaatctgatctatgcaggaaggacactcggcatgtcagatacagaaatcttctggaaagtagtgatcccgaccgcaggacctggaatcgcatccggaacgattcttacatttgccagagcactcggagaatatggagcgacatctatgcttgccggaaatattccgggaaagacaggaacaatctcgcagaagattgcaatggtcattcaggacggagactatatgacagcgggcgtgtgggttgcgattgtcatggtgattgcattcctggtgatcttcctgatgaatctgatctcgggcaagaaaatgaagaatgtcaagaggtggtaagagatggcgatagaagtaaagattcagagaaaacggaatacatttgagctgaacatagattttaaaagtgattctaaacgaatcggaatcctcggcgcatccggatgtggaaagagcatgacactaaagagtattgcaggaatcgagccgccggagagcggattgatcaaaattgaaggaaagacagtttatgacagcgaaaataaagtgaatttaaaaccgcagaagcgtaacattggctatctgtttcagaattatgcacttttccctacaatgacggtggaaaagaatatcgccgccggattaaaagggaaaaagcaggagaatgcaaagcgtgtgcgtgagatgattgagaaatttcagctaacaggactggaaaaacgattcccggcagagctttccggaggtcagcagcagagggtagcccttgcgagaatcatggcttataaaccagatgtgattctcttagatgaaccattttcagcacttgatatgtatctgaaggaccgtctgcagcaggaattacaggaacttctcgaagattatgagggtactgtgatcatggtgtctcacagcagagatgaagtgtaccggttcagtgaagaactgctgatcatcgaccaggggcagattgtggcagcagggaagacgaaagaattgttccagaatccgcagagaaaagaagcggcacggctgactggatgcaagaatttcacaagagcagtttatgtggatgagcataccgcagaactgacagactgggggattacgttgtgtacagagcaaagaaatatcccagaaaatatcaactatatcggttatcgtgcgcatgattttgtcccgatctggggagaaggtggaaagaatcagattccatttctattagagagtaaggcagcactccctttcgaagataattattatctgaagcctgcaaatgaagaggcagatccgcctgtgatctcctggtttgtacagagagagaatcaggagaagatccgggaaaaaggaatgccggatgcgctggagctggtggaagaagatgtgttgttcctggaatagcatcttcccatatagacgatttttgagtgaaccgttacgttttgaaagaaatgtaaaaactcctttttaggatatttacatcagggaaaaactagtatataataagcacgtttttcaaaaacacatcccgtccgttggttacgaaacaattcttgtgaacagtaatcaacggacgggatgtgttatgtatgtagtcactgataaatacggaaaaggaggagcaaaatgaaatcagtacagaatgatatgactgttggaaacccgatgaagatgatcttaagttttacatttcccatctttctgggaaatgtcttccagcagttttataatatggcggatgctgtgatcgtaggtaagttcgttggaacgaaagcacttgcagcagttggaagcacaggaacaatcatgtttctgatctatggatttgtagttggaatgacagccggatttactgttctcacagcgcagaagtttggcgcaggagacatgcaggggatgcggcgcaccgttgcgggggcaggaatcctttcgctgttggtcggtctgttccttacggttacttttatgttatttatgaaaccacttttgcatctgatgaatactccgtcagatatttttgcagatgcatataagtatattatgatcgtcagcggaggaatcctggcgcagatgctttataacttgttatccagtattttaagagcattaggaaacagtaagattccattgtattttctgattatcagtgcgttgctgaatatcgtgttggatctggttttaatcattgtatttcagatgggcgcaccgggtgcggcaatcgcgacggtagtagcacagggcatatcaggtgtactctgtcttatttatattatgtggaagattccgcttcttcatctgaaaaaggaagactggcatgttggcgggcagatttgcgcgatccagttaaagatcggacttccgatggcattgcaatattctatcacggcaattggaactatgatggttcagtctgccctgaatattttgggatctacgcttgtggcggcatttactgcggcaagtaagatagagcaggttgtgacacaggcatatgtagcgatgggaacaacaatggcaacttacggagcacagaatatcggagccggaaatgtaccaagaatccgtcaaggtttcaaggcgtgtacgattcttggtatcggttactctcttgtagcagcaacatttatcatgacagtaggaaaatacatgacctatctgtttgtctcagaggatgtggatattatcatgagttctgtggatatctatctgaaatgtatcggacttttcttcattccgcttgcaattgtgaatatctacagaaatggaatccagggactcggatacggactgctgccgatgatggccggtgttgctgaactgatcggaagaggtgtggtagcgcggatcgcagcaagagagagaagttatcttggtgtttgcctggccagcccggctgcatgggtgctggcaggaggtctcctgatcgcgatgtattattatattatgaatgttcatatgaagaagatgtttggggattataatcagaaggtctgattatttacaatgtgcattgcatcgcggctcgcattcaaccatttggatttctcagtttcaaagcgttcgaaaagccaggcgatggcttcgtccattccctcatcggagagcgaaaatgtcttttgttctttctcttcttccggtgtatcttcgaagcaccatggctccggataaatgaatacggtgaaggttgtgctgctttttccatcatctccgcgaaagaaatagcgcattccatgatgtgtacctgaaaatggttctttcttaagtcccccgtaaggaatcagttttttatcaatcatagtaatacaatgtcctttcgaaaaaagtaatttgttttgttattgcgtttttgaaaaaaggaagccagaagtctggcttcctttttattatagtggaatgcgttttcttctgcaagaaatgatttattccatagcttttttggcaaattcagttgtgacaagtttttcataaggagcgcgtgaatccagttctccggcactttccagaatatcctgaagcagctcgaaactctctttttcaaatataagatctgctttccaggtgtcctgtgtataataacggtttacaatcgctgtgatggttttaagatctgtttcaggaaattgaggggcaatcacggaagcaatctcctctggcgtatgaagctgaacaaaatccatacctttttgaagcgcatttgtaaaggattggataatctcaggatgtttgtcgagataacttttctttgcgctgtaggcagtgtaaggaacatagccgctgtcagtaccaagtgaggctacaacatatccttttccttccatttccaaagcggttgcacttggctcgaattcaacagtaaagtctccacttccctctgaaaaggcggcagcagtggaaccaaaatcaattccctggttgatgttgaggtctgtttgtggatcaattccatttttctttaaaatatattcaaataccatttccggcataccaccttttctaccaccaagaacatctttcccctttaaatcagtccacttaaaatctttcatctcttctctggcaacaagaaaattaccggcgcgctgagtcagttgggcaaagttgacaacagaatcgttagcaccttcattatatgtgtagatggatgcttctgatcccatgaatccaatatcagcttcaccggagatgacagcagtcattgtcttgtcggctccaaaaccagttacgagagtgagttcaattccctcatcttcaaaatatccattttcaatggcaacatacataggggcatagaagatagaatgggctacctcgttcaatgtcacagagacaggagcagaactggtatctgatttggttgtgttggagccggtttctgttgtgtcgattttggaatttgcatcattatctttggaagaatcagaaccgcaggctgataacagtccaacagtcagagcagaagcgagtattacggaaatcaatttctttttcataaatcctccagagtgatataagattctcgtttaaaatatgcaagaaaagagaagatgtgtcaaattctactccaaaggggtgttcattttggaaaatatcctttatgcttagtgtaaacagaaagtaggtgaaatgtatggatcttgttaaaattggaaaatatattgcagggaaacggaaagccctgggaatgacgcagaaacagcttgcagaaaaattaaatatgagtgacaaatcagtatcaaaatgggaacgaggagtttcccatagttaaagataccacaccaaatataacgaatccacgcttatatgatactgcatgaaaaaaggtacttgataaaagcaatgaagcgcaatatcaagtacctttttgatttgttttttacacggttattaagacaattactcttattccgaagtcctcaatcgttccaccacagttcctttgttaaagaagtggagaacgatcagcggaataaccgcagccagcagcagataaagtacaccgatgaccagaaccggaactaacgtgatattcatagtgaagaaccacatagatggcgagttcaagacatttttcagcaccgtcacagcaagcagcagtgcaactactccaccaatgatgtctgcaccagcggcatagtagacgccttcataaaccatcagcctttgaagctggcgatttgtcataccgatactctgcatagtcgcaaactcatggcggcgggtgataatattggtgataatcatgtttgtaaagttaatcagtcctgccaaagccataatacagccaatcagactgcctacaaccagaaccatacttgcaacagaatttaattgttctttcagtaattttgttgaggtataggtaacagaggggttcttttcaatataactgctcaaaaattcctccatttgcggctgtaaggaagcatccatatcaaatccatagctcagcagggttggggtcgtgtaaatctgtttgaacagagtgtccggcaaatacacaaagggcgcatcgccaccaatattccctatagccgtagttgttgacggcgtttcgtcctcagttccaacggtacaggcttttgcaagaattgtgcaggttttgactaactcgccatccctgtaaaaagaaatactgtcgccaatctgtaactgttctgtcaggggcgtacttttcggaccaccactcagtcggtccaacccttctccaataatgacatattctccagttagcattttttgtttcagtacattaggatctgtttctccatcataaatcatcatatccgcccaaaaatgttcggaagcgccaaaaacatttccaaagaaaagattttctgcatccggggcagtcttcatattataatttccaaaggctttgtggaggctaccgtcctgatcttcataggttgaggtacactccagtccctcaaaaccataatcaaccaacacgttactgtcatctgcggtattgcgataaagataccgttcttcttccagaccgtcctgctcacggatcatatctaccacttgctgtggaagtgcatcttcgtgatgtcgaaagccttccaaagcattgactgcaatcgaattatagacggtaaaatctgttttcgttgtgcgggtaatccacttttcttcatccatgctctgtgtcacaataatcatagagttgaacagaacgatacacaaaagcatagaaacaacgatgaatacacagcggcgtctattgcgtcccaagttggaaaatgccatatgggagagttttgcacctctggttcgtgtaacggttttctttttataatcatcctgctccgtatagcggatcgcctccatgggaggtacttttgcggcctttttggctggtttgcgggtactgataaataccgtcagaatcgtaaacaaggcagctataataaataacacgggggaggtcgatgtctgcaaacttgtcgtagaatactcatagctaaaaatttccattactgccggaagcaacgcccggccagcaaagaacccggcaattaaaccaataggcagcccaatcagggtcagccataccgcctgccgattgacgatgcttttaatttgccgcgtagaagcaccaatcatccgcagtaagccatattgccgaacatcctgcataacggaaatatcaaaaatattataaatcagcaaatagccgcacaatacaaacatcagcacaaatactacggcaaataagatggactccggagaaatcatggctttccccatctggttttcaacagagaggataaagttatcagcagacatatcctttggattgccgccaatagagtagacaaagttatccatctgctcctgaatgttcgtcttgtctttcagcacaacgtcagaaaaagtaacccctgagatttctccgtccactgcgcgggtatttttcactacatccggattatcttttacaaactgctctgagagaaccgccacgctgaccatatcgttgcttgcttcccaccaaccggaaagcaccatatcataatggtaggtttttccccgaatttcaaattccagaggaacttctgctccaatctccggttccacaccaagggcttttaaagccagttcggtagtagcaatttcatttgccttttccggtgctgaaccatgcgttggcacacagaatgtaagttcctgctgtatgctatcagcatagtttaattcaacagaatgacccagggcgttgcttgcatatccaatcatccgccgatgacctgcctgctccacaaaatcactgtttttcagttgctcaaattgctcctctgtcatatagccgaaggttccatctcccttgctgcctttctgcatctgcatagagagctgcatggaggataccatgttaaatgccagtgaagtgatggatgtaaacaaaaatgctgtcagaacgatcgcaagaatcgccgccagattacgaaccttattcttcttgaaatattgtttagacagccgtttgatggtttttgtattattattgccaaatagaatgtcattcatagtcccgccccctttactgtacgattttgccatcctcaatccgaataatacggtcggcgagctgggcgatctcattgttatgagtaatcattacaagagtttgttgaaatttctggctggttactttcaaaagccccagcacatcactgctggtcttgctgtccaggttgccggtaggttcgtctgccagaacgatagcgggcttcgacaccagagcgcgggcaatcgccacacgctgttgctgaccgccggagaggttgttgggcatattgttcagcttatcctccagccccagcatctgcactacttctttcataaacttcttgtctactttgtttccgtccagctccacaggcagcacgatgttttcgtagacatttagcaccggaaccagattgtagttctggaagatgaagccaatctttctcctacggaagatagtaagctgctcatcttttaatgtggagagttcacgcccatccacaataaccttgccggaggtaggcacatccagcccgccaatcatgttcagcagagtggatttgccgctgccggaggttcctacgatggctacaaattcgcccttttcaatggagagggtcacaccatccaaggctctggtaatgttcggctttgcgccataatattttttcagttcagtcgtttgcaaaatgctcataaagaacaccatcctttctttttgataaatccattgtaacgaccaaacctcacagaaatgtcacagccgatataataaattgccctgaaatgtcacaattctgtgacatttcaaaaaaacaggttattcatggggaagaaaaacggagaatgttgagcctgttcctacttgagaagttacttgtatataaccgttctgtaagctaataatttcccttgcgagatacagcccaatgccgattccctctatatcatggacattttcttcccgataaaagcgcctaaaaattgctccctgctggttttcgggaatacctttgccggtgtcagtaacgctgacttttaggtgcatttcccagctttcaacgcaaacacgaatagaaccgtactctggcgtgtacttaactgcattatccaatatgttaaataaggcttctgctgtccatttgcggtcatgggaaacaaccaatgtttccgggcagtttacttcaacttgtatgtgctttctttcagcgttcagaaagataccgcccagagccatagccagagtatcatagatgggctgctgtttcttttcaagtgagatgacgccagtttcaagtcgggaagtttttatcatagcctgcattaagaaatccagtttatcaagctgtgtgccactggcaagtagaaattcccgctgtttatcctgtggcacttcttgttctaataaggtggcatttatcatttttaagtttgctatcggtgtctttacctgatgagaaatatcggaaatcaactcctgtaagtcagctcgttcactggcaacgctgtttttgctttcctgcataacctcataaaggcgcaccagccgatgattgattttataaaataggttttcttcttcggcaacctgtgatatatctatttttccattcatcatttcgtctaaggtgcagcaaagcatttcagaaaacaaagtcagcttttgccttatcagtatcacaaaaacagtaacacaaagcagaaaaagcagacagaacgccatgctacaaaataccacagacatttctttggtcaggatatatagaaccgaaaacatgaccacggataaaagtaaaatggtagttgccagtattatgcagactttatttaaggagagtttttttgaaatcatttttgcactcctccaatccacatatagcccataccgtaaacggttttgatgtaggaatgccggttcgtttcaattttactgcggatgcggctgatcgttgtggtaagtgcgtgttcatccacataattttcatctgcatcccacagcttttcaagcaatacctgccgggtcaggacagtttgagaatttcttgtcagcacttttagtaaacgatattccaatgatgtaagggtaatcggctgtcctgcaagacacgctgataattcggaaaaattgatatacaaattcccatcatcgtagaaatctccgccggattgtgctgaaatgcggttcagtaaagcagatactttcttttggaacacgctgataggaaagggctttgttacataatcatctgcgcccaattcaaatcctttcagcatatcgctttccatatcatttgcggttagaaaaatcacggcggtatcgggacggcgttcttttacctcgcggcatatatcaaatccgttcccatccggcagattgacatccaaaacgattaaatcatagtcctgtttttcaagaaatcttatggcaacagcctttgacatagccccatccacggaatatccgacagccgacagattatagcttaatgtcttattcaaaagctggtcatcttcaacaaccagtattcgcatagtatcacatcctttttctttttatagtatcagcaaaatgtcacagaaacctcacaacgagaaaaaaatttagtattcagtcagctccacaattacattactctgctgatacagccagtccgtaaattctttcgggctggctgttcctgtttttacagccttttttctctgtaaggcttctttcttaaagtcggaaaaggcagcctgtattttttccagacggtcagccggaaagcctgcggtattttttacccggtttattttgttgcgccagttctggcattcatttttataaagcagatcatagttattttctcttgccctttcgtcaaattcccgcttgttttgaagcgcctgtgctttgcggcacttgtcgctgcacagctcataccgctggctctttgccagaaaatatttcccacagaccttgcactgccggaagcaaagcccccagtcattcagccggttcaaataataggtaatcaacgggtagagggacgcataggcagacacacattcttctgtgcgccggttgtccgggaaccagaggtcaagccgggtatcttctgacggtgcgcctttgaaataaaggctgcccgcttgaaaatgtttcggttttcctgtctccctgtcaaaggtcatggcttcgttatggaataccccggtcaggctgctcattttatccatgaagcggtcacaggcagcgttacggtcacggggttctctggcaagcagatagctgttccagatacggaacgctacatacattttcagagggtcgttgctaagatattttccccagagaaattcgcttgccgcctgctccagctccggctgtttccatcggttggagtggagggcttgccgcagtggagaaagcccgtataagttccaatctctgtccgtgtcacgctcaaagtttatcaaaaaagttcccagcgggcgtgtcatatcacaaagcacctctgcgttttggctcccgttcagccggaagcggatctgctgttcttccccaatcaaaatccgctctttcattttcttcctgtccagcgtcaggacaaacaaaatcctctcaaaacatggctcatgccgtataaactgattctccatccctatcccctgcctttatctatggtaattatataatttagttatatccgttacactcatggtatcgcagaagcattgttttgtcaaggatagtccgctatgatgattgtagttggtaatttcgtgccacacagtaccttgacaagtgaatgaccgtccaaaagggatatgaccggcaggagaagtgacgcatccggcgcaccaatgcagggaaacaccgcaggaatggggcaggaaaacggcttttggggagaacggcagcaggaagcattttaacctatttgatttatgggaggaacagaatgaacgataaaaagagattgaacagctacgaggatttaccgctggttctggatgtggcggacattcagcggattatgggaatttcaagagcgagcgcctatgagctggtacacacacccggctttccggcgttccgcaggggtaggcttatcaaggtcagcaaaattgctttctttgaatggatggcaaaaggctccgaaaccgtaccgagaagcgacaaataagcatgaggtatcattccctgactgcaatactgccgcactttccaaaggggcatacagagggaaaaaaccttaaaaatgataccgagacgctacaccaaaacagcctatctgtgtacatcagatagaaatggagaaaggagccggttatggcaagaatgagcaacaagcggcggctggaatggtctttcttcttaaatgatcgcagccgtatcacttacaacgaactgtgccggaaatgccagcacgaatgtaaacagagcttccgggcggttgtggttgactgcccgaagtatctttccaagcgttccaagaaaaaggacaaaactgccggaaacggcaaaatcccttaggaactaagggcgcacttctatacatagtctaaagaccatgtatcgtgcgtcctgcggagcttacctctgccgctgataaaatcagcaatccgaggtctgcgttcgcttcgctccgacaaggtggctacacccccttgcgccgctaaagcggctatcccctgtgtacccgccgcaaagagaaatccgctctgcggttttcccttttcatcggggtttatagaagcactgacatacggactgtctgcggatggtctttctttatcttataagtaaaggatgtgagaacatggaaaaatctttggaacagttgaagcaggaatatgaaaaaaccactgtcctgctggaacgggaaaaacggaaaatgcagcgtttgaaaaaccggcaggcgtatctggaaagcggttcccggaaacagaggacgcaccggctgattacccgtggggcagccattgagagcattgcgccacagacaaaggagctgaccgaaacggaattttattccctcatggaaagcattttgaatctgccgcaggcagggcaattcatccggtctgccgcagagaaccacgcccgtatttccgggcaggagaaaggcggtgactaaggatagcactttatcatttttcaatcgcacagataaagcgcagcgccggtcagagcgccattgccagcgcagcctaccgagccggggagcgtctttacagcaactactatggagaagtcagcgactacaccaaaaagggcggcgtgatcgcttcagaaatcatgctgccgccccatgcgccggaaatatatcttgaccgggcgaccctctggaatgctgtggagaactgcgagaaacatcccaaagcccagcttgcctattcctttgatattgccatgcagaatgaattgacgctggaagaaaacatggagctggcgaggaagttcgtgcaggagcagtttgtggcaaaaggcatgattgccgaccttgcttttcacagcccggagaaagaggacggcggcatccctaacccgcatttccatgtgatgacaaccatgcgccccttgaacccggatggcacatggggacaaaaacagcggcgggaatatcttcttgatgaagatggaaaccgaatccgggataaaaacggcgattatatgtttaacgctgtccatacaacagactggcatgagccggaaacgctggaacactggcgggagcagtgggcggctgtcgttaatacaaaatttgaggaaaaagggctggatgtgcgtatcgaccaccgttcctatgtgcggcaggggcttgacctgatacccactgtccacgagggcgctaatgtccggcagatggaagtaaagggcatccgcaccgagaaaggggaactgaaccgctggattaaagccaccaaccggctcatgcaggatgtgaggaagaagatcaaagccctgtttgtctggatggcagaggtaaaagaagaactttccaaaccgcagacaccgaaccttgccgacctgctgatcgcttattacaaccagcgcaacgcaggggcatggagcaataaagccagaaccggaaacttaaagcagtttgccgaagccgtcaattatctgacggaaaacaagctgctcacattagaggatttgcaggagcgtctttcttctgtcaacgaagaatttgaagcgttaagcggctccatgaaaaagaaatctgcccggataaaggaattgcaggaattgatacgggagggcgagaattaccagcggctaaaacctgttcatacggaattgaacaatatcaagtttaagaaacagagggagaaatttgaaacatcccacgatgcggagttacggttgttttatgccgcccgccgtattctgaaagaaaaactggacggaaaacccattgccctgaaagcatggaaacaggaatacgcacagttaaaaacagagtatgccgaactgtctccgcagcacaagccgctccgggaggaagtgatacggctgcggcaggtgcagaacgccgtagataccgcactgcgccagagagagcagctacaggaagtacagagaaagaaacacgagatggagctatgacataaccggcagctttaccgctgccggcatttttatggagggagcatttgaatgtatttgaagcggtgaaacagtctgttaccacccggcaggctgcttcattctatggaatccgggtggggagaaacggcatggtctgctgtccattccacaatgaccgcacgcccagcatgaaagtggacagccgcttttactgcttcggctgcggagcttccggggatgtgatcgactttgccgctttgctacatggattggggaaacgggaagctgcggtcagacttgcggaggacttcggcgtttcctatgagaaatccggcaatgcaccgccagataggaagcgtcacaacaggtcacagccccgacaaaaatcagcggagcagagatttaaggaaacggaacggtattgtttccgggtgctatgcgattatctgcgcctgctggagcattggaaaacagcatacgccccacagccgcaggatgccatctggcatcctctttttgtggaagcgttgcagaggataagctacacagaataccttttggatattttgttatacggagaaatagaagaaaaagcggcattgatcgccgcacagggaaaggaggtgctgcggcttgaacagcgaatttcagagcttgccgccggaaacgcaggaagcggtcaaaaggacgatggacacaatggaaccggcgcagacaccggcagaaatccgggagacgttagaggggacgcagaaaggcggcgtgaagaacagcatccgaaactgcctgacggtgttccagcgtgacccgctgtttcgcggggcgctgcgcctgaaccttttgacggagcaggtcgatattgtgaagccgctgggctgggagcgcaccagcgctacgctaaccgacatggatatgaactacctgcttctgtatctggaagaaaactacgggcttaccagcgagaaaaaggtgcagagcgccatcaagattgttgccaatgaaaaccgctaccatccggtcagggattacctgaacagcctgcaatgggacggcacagagcgcatccgttacgccctgcatcactttctgggagccgatacggacgaatacacctatgaagccttgaaactgttcctgatgggagccatccggcgggtattcagaccggggagcaagtttgaggtcatgctctgtctggttggtggtcagggagccgggaaatctacctttttccggctgctggcaggcagggacgaatggttttcagacgatttgaagaagctggacgatgaaaatgtgtaccgcaagctgcaagggcattggattatcgagatgtcggagatgattgccacagccaacgccaagagtattgaggaaatcaagtcattcttaagccgccagaaagaaacctacaaagtgccgtatgagacacatccggcagaccggctgcggcaatgtgtatttggagggacgaccaaccggcaggactttttgccccgtgaccgcactggcaaccggcgctttctccctgtgacggtgtacccggaacgggcggaggttcacatactggacgatgaagcggcagcgagggcatatatcgaacagatgtgggcggaagccatgacggtttaccgcagtgggaagtataagctgtcattcagcatagaaatgaaccgatacctgaacgcccaccagcaggacttcatgcaggaggacacacaggctggcatgatctacgcctatttggaggactacaccggcgacagggtatgctccaagcagctttatgaggaagcgctggggaacttaaattccccggcagactgggagacacgggcaatctgcgagattatgaataccggcattgcgggcggcatcatacagggctgggcagcctacaaaagcccgaagcggtataagaaatacggttctcaaaaaggctgggagcgtgtcaaccaagccccgccggagggggacggttttcaggaaatcacggaagaagaagcccggcaaatggaactgccattctgaaaagctaccggttaacagtttggttgacgcttcggttgacagccggttgacggggaaaagactgatattgggggcatttctctcctttgtcaaccatgtcaaccaagaaatcaaagaaaaagtaaaaagtaataatagagcgcctgtggattgttttcaaagtcttttctgctggttgacacggtttggttgacatggagacagtccgcggctgtacacctgcctgacattcccttgtcgggcatatttcatttatggaggtaactgcctatggcaaaaaacaaaaacgagagcaataacaaaaatagcggcaccctgcttaccgaaaaagacggcacccagtattttgtcatggggaaagtccgtatcaaggtatcggagcatttcgcacaggatgggaagccgcttgacagcctgctggaagatgtgatccagcacgctgccgccgcttcctgaaaaaatacggaataacgactgtcaatcagcccacgcttatgatatacttgtatcagcgagtattgtataagcgtgggttgtttcttttagaaggaggatttttaaccgtgaaacaaccatacaatacaacgatttataacactgcactatatttgagattgagccgtgacgatgaattacagggagaaagcggcagtatccagacccagcgaatgatgcttagacagtatgccgccgagcatgggctgaccgttgtagacgagtacattgacgacggatggagcgggacaaatttcgagcgtccaagtttccaaaggatgattgatgacatcgaggacgggaaaatcaactgcgttgtcacaaaggacttatcccgtctgggaagaaactatatcctgaccggtcagtacacggaaatctattttcccagcaagggagtacgctacattgccatcaatgacaatgtggacaccatcaacggagaaagcgagcttgccccgttcttaaacatcctgaatgaaatgcacgcccgacagaccagcaaaaaggtcaaggctgccatgcacacaagatttgccaatggcgcacactatggagcctatgcaccgctgggctatgtaaaagacccggacaaaaaaggtcatcttctgattgacccggaaacacactggattgtagagaagatttttgaccttgccgtacacgggcgtggagccgccagcattacacggattctggtggaggaaaaagtacctacccccggctggctgaactatgaaagatacgggactttcgccaatatctatgccggtgcgcccgcagaaaaagcctatgcgtggacgattgcacaggtcaagagcattttgaaagaggaaacctacatcggtcacagcgttcacaacaagcagagcaacatttcattcaagaacaagaaaaaagtgcggaagccgcaggaagaatggtatcgtgtggaaaatacccacgaagccattatttctgaagaagtgttccaaaaagttcaggagctgattgcaagcagacgcaggcgacagaagaatggcacaacgcagatattttccgggctggtaaaatgtgcggactgcggatggtcattggcttatggcgtaaacagccagaacaaaaatccctatgcacactaccattgcagtaagtacggacagggattacgccagtgttccatgcactatatccgctatgatgtactgtacgcctatgtgcttgcaagactgcaatactggtctatgcaggtacagaaagacgaggacaagctgctgaaacggttgctcaatgccagcgacagggaaagaaactctgcgaagaaaaagcaggctgcggagctgaaaaaggcagcgaagcgtaaagccgaggttgacgggctgtttgctaaaatgtatgaggactggtctgccggacgtataaccgagtataacttcaatatgctgtccgagaagtaccagaacgagcaaaaggagcttgaaacaaaaataagacagcttcacgaaacgatggaagccgccgtacagaccgcagcggatgctgaaaagtggattgccctgatgaaacagtatgtcaaccctgtggagctgaccgccgaacttctgaacactctaattgaaaaaataaccgtccacgaagctgtcaagggcgaggacggaagccgtgagcaggaagtagaaatctactaccgcttcatcggcaaaatcgactgacctttcttttttacccaataatatctttaattaagggaaacgggcatttgcttacctgatgtgtcggtttatatggaactatgtgagatattgggaatcagcataaatgaatttcttgcaggggaggatattgacgcagaaaatgtagaaaaaaagtcagaagacaacattatacaagttacgaaagacagtaaaaagaaacagaaaaatttaaagagcattttagcagtggtaacgacatttgcagtgatcatggttctggttttaggagcagttttcgttcacaaggtgatgcagccgaagaattatattacagcagttgacaggacaagtgcagaaatgaaaaccgcagaattattgtcgggagcagatggggcatatctttttaatttttatgcaaaagaagagtataagacattgacaatttatttgtcagagtatcaggcgggagaattgattaataaaagtaaagtggcagatttggactatgatgggatcgaatcggctaaaagaggtgtgattgctgtgataccggattttgaattgtttcgagtgaaattgatcatagcagacgattattctaaatgttctacagattttccgattctggaaaatgtagaaaacagagaatattatggaagaagtgcgacacaagtggaaggtgaagttccgattcagcgggatacagaacagggtctgatggcattgatttacggagaagatggattggaaacaattccggtaaaagaaatggagcagggaaattttagggagaagaatgattatgtctattatctgtccttccggtttggaaaataattacgtaaatgaaaatatgagaggtaagatgagatgaaaacaagagaagaagctgctgcctatggattaactttcccgaacagctatgaagacaggccttttaaagaccaacgatggcaggtgatccgtgtaaagccggggaaaaagatatttttgtggatttacgaaaaagacgaattgatccatttgaatgtaaagacggattcgagatggagggatttctggcgtgcagcgtatccatcggtaattccgggatatcatcagaataaagagcattggaacacaattattctggatggatctgttccggacaaggatattgaacggatgatcggtgagagctatgatcttgtaacagacagtcctacaaaaagaatttatgaagctgtgaaacggattccgaaggggcatgtggcaacttatagacaggttgcgaagatggcaggaaatgaaaagatgtcaagagcagttggaaatgcgcttcataagaatccggatccggatcacattccatgtttccgtgttgtgaatgcgaaaggcgagcttgccggagcatttgcatttggcggagcagatgtacaggcagagcttttgagagaagacggtgtggaagtagtagatggaaaggttgatctgacaaagtatcagatggatgatcagatggaagagtaagatagtactgtttcttttgggaaagatagtgtataatacttacgagtgattgctgttcgcaaagtactgcgaacagcatctttgtatagtgcaaagagcaggaaagaatacatcattatggttttgcttttgaagggaaaaaagtgttgattggataagaaatggagaaatgaatgaaaattaagaaagtggcagtcctcggtgccggagcagtaggctcttatgtaatctggggattatcgagcagaaatgatatagagcttggagtgatcgcagaaggagaacgagcagagagactgaaacagaatggatgcacaattaacggaaaaatataccatcccgaagtatggaaccccggagaaacagacgctgtcgatttactgattgttgcattgaagtatggctcactttcggcggcattggaaagtattcagaaagcaaccacggagaatacggtaattatgagtctgatgaacggggtagacagtgaagagattattgcagaaaaagtaggagtggagcatcttcttccggcagtgatcaaggtcgcttcacataaggaagaagatggctatcattttgatcctgagacaacaatcggaattatttttggcgaacttactgcaccttacgatagtgatcgcatcagggcaatcgaagaactgttcaaggataccggaatccatttccgggcgacagagtatgcaagagaagagatgtggagcaagtttcggctgaatgtctgtaacaatctgccacaggcaattctcggcgcgggagttggatgttaccgtgacagtgtgcatatgaaggcaatcagtgatggactgaaaggagaactggaagcaattgcgcaggcgaaaggaatcgatctgagtaagactgaggcgtcttccgggcgtggaagtgcagtaccgccatctgcgcgttattctactttgcaggatttggatgcaggaagacacacagagattgatatgttttcaggtgcactgatccgtatgggaaaggaacttggaattccgacaccgtataatgagtatacatatcatatgattaaagcactagaagagaaaaatgacggacggtttaattatacaggagatgaagaaccgacctggtcaaaataaaacagggaacaatttgtggcagagacaggttatgaaaaaatattgaaacagtgatgttgaaacaacataaaaggtgaggtaaattaagatgaaagaattatacgaagcaatcgaagcaaaaattaaagcaagcggttatccgagagcaatctccggagaagatgtatacaatgacatctgtgaccagattgatggaaaagagaatggaagttatgtattgttatccaagttcgaagatgatgtgatttttgagtatcatatcacgattcaggatgaagatttcaacttggggattttgacaatgcgaacaccggaaggcgtgtttgagacagattttgatgcggaataaaggggggatttcagacgatagaaaaagcgaaatgagaggaaaaacctttcatttcgcttttttgaaattccgaaagattctcattgacgtgagtttctaaagcccaaactcgtttaataacttcttctgatattctctgtctactgctgccttgagaatctcatcacttctattaagctcagataatttaagattcagttgattgattctgctttctccaagagcttccccttcttctcgtttttcatctaattcgtctttcattaattctaataacgcattacacatatctctttttccctcctttagtcgattctcgtttgcttttactataatctccataacagcctgatacagctgattctctttgttctttttataatcctccaaaagctgccttgtgacagacatgtcttccagtgtatctgtcaaactatataaccagagatttctctccggtgacaatcgatttgttacaagaatctgaatcggtaagatatctccaattacataataaatcccttcttccggattatcaatagtgtagtggcgtacttctttcaaatgtcggatcagttctcttggatatcgttttgacactaaggtgattgtcagctcctggattggaatttcattcaccttccctgtatctgctttataaaaattcgtatatccatataccttatagaaatcgtccacggaaagtgcgtcggatggtgatttatattcgatgatattatacttacggaatattttcccaatatttttatggatcggctccgcgttcttctttttaatgatcaacacatcaattgccattggctttgaacttaatagatactcccgctcaaactttaatttttccgtttcttctctgaattcaatctgcaagtctgcataaaatgcaggatgccactgaagcagctttccatttgccggtttttgtttttccggcaattgctttctcttttgtttcatctaagagacctccttatgtgattttcacagaagttctctctatcagaaaacctctgctttaaataatggattttaaaagcatgaatttcctgatttgacaggtaccatttacctgtaatgaaatctttatatgaatttagatgttttagaaaatatgctttgaaataggatagcatatttacatgccgatgtaaatactgaaatgccgaagatggtaggtatgataaaatcagtataaagtcaacccaacaaaagaagattgaaataacagatgccaggtgatatattattacaaaagaataaaatttgtaatcccctggcagggcgatttacaaatagtcacagaaggaggaatatgttatgaagaaaatcagcagagtttcaactataattagcgcaatcatgctacttacttatattattgttcttatcagcatctggagcaggattcctgatacagtaccgacacattttaatgcagcaggagtggcagatagttatggaagcaaaagaaaccttgcatttgaaccagttcttgccgcgtttctattgttattcctctcattgatggaaagaattccggcaatctggaatttcccggtggctgttacagaagagaacagagaaagattgtataagattgccatgataatgatgggcgggattaaggttctggttactgccctgctgattgatgttggagtcagcagtcttgtggaaggatatccaatctggccgatgtatatgatgcttggagtgatgatgatactgattatcgtatcgattgttcagatggttcgggcgaaataatgtggaataagaaagctatgggttaatagtccatggctttttatacaatataagtcagtaaagaagggagcttttatgacaacatatgtaagaacagattggattccacaaaatgaatatacgacacccattcgagagacaccagtttactgtaacagtggaattataaaagctgttacaaaagagaaagagaaaatttcggttggaacgattagatatgaagagtttgaaaatgaagaatttcaatatattatttctccattttggtcggtcattgatacactgtctactaaagtgtttcagggaattccaggaatcgatatggggttaagattagagcgttattaccgggttaattatgaacctgtatttatcacagaaagaactccgggaaaatcaagggaagatttgtgggaattgttagagagtgtcggacttgattattatgatagattagaatggttgattcgaacggatcttcgtgctgcaattgataacttgattgttgagagacaatgaacaaaaaaccctcttgtgcaatatgtttatccaaaatcttaaaaaaatataaaatttatataaaattatatatgtctttttgactatctttttatatcttcttaaatgtccgcaaagccttattttataggctctacgggcattttgcttttgtggtaaacctcacatatctaggtctatcttcttatattttcgctatcaagcgtggttaaaatcgtggtaactacttcttatgcgattagacgctgaacctctgattttgcggtatctatggacgcatgagcgtaccagttcattgtgatactgatgtttgaatgtcccatgatatactgtaaatcttttgggttcatgttcttgctagccagccttgtgcagaatgtatggcgtagcgtatgcggtgtgatatgtggcaagggattatccttgtggtgcttgttgtatttctttatcatacgaacaaataaggcgttataatcaatcgcaactttgggcttccctttatgattgacaaacagaaaattgctccgtccgtctatcacaaatggttctgcttttgggtgtttcttcataacccgttgaaatgcctgtattgtttctctgcttaatggcacttgccttattccgctctttgttttaggcgtttcaatataatagccctgttccttgctctttaataactggtggtcgataatcacaacttcattcttgaaatcaatatcggctactgtcagtccgcacagttccgagatacgaagtcctgtttttaacagtatcagcacatcatcataatgcttgtgatacacattgtccgtcttaataaatgacaataaggcttgttcctgttcctctgtcaatgcgactttctctttggtatcattttctaggacttcatttaacttgaaatcaaaagggttcttccttacgcaatcgtcttgtatggcgatatagaatgacgcttttaacgagcgtttatggttgttaatggtattgtaggaaaagcctttgtctttcatgcgtaacgcccattccttagcgtcagagggcttgattgtatcaatgctcctagcacctaacttatcctctttcaataaccgcatgagttgttcccgttgtttcattgtgcttttcttcacgtttgccctctgtgcgttctgtttggcatagagttggcaaagcgtcattttcttgcctgtgctgtcgataccgtcctcaatatcccgtcttatctgctgttccagttctcgaagtgagggtttttcccgttttccctttggtgttgggtctgtgggtgtcaatctccaagcatacacatattttgtgtttccaaatgcgtctacatatttatataagtatttcccgtctgttcgttggctctctccagtatgcaggatacgtcctttactatcccgtcttttttctttcatggtgtctgctcctttccttgttggaaagagccttgatatgacttgtgttcatcataacacatacaaggctcatttgcattagattgcgtccaatttgtcaatgacctgttcaaactgtcggcgtttaatctgtatgcggttgccattcataatgagccagccagcgtccttgttttcctctgccaatcgtcttaacttgttttctccgatacggaaatactttgacgcttcttcaatggtaagggtgtattttttccatacaggaatatcgttgttattcatcagataccccctttcccatgtttcgtgtcatactggatataggggataaggtcggtgcggtctatcctctgtaagtgggcggttagtttactggaaagggaattgctgtatcttgctttatcaagcatagttcccactttttccaatccacctaatgcgtcatgttcttctaaaaagtaaaaacttttgacagcggaaatcacgccaccctctgtgagccattgctgtgtttcttcaagagaattatgtagtttcggtacttgcagttttaagactttcacagcccctaaaaagcgttcccaaaaccgacacgttttccatctgctcttattactttcatttctgtttggcacgacaaagcgtaggttgcttgccagcagtccgaaagccagttccccaagttccagcggtctgtctttgaatgtcatggcaaaagcatgagccttatcatcacgtagttgcatttctgtccgtttccaactgccgacttcatcaagtgtcttattatgttttgaacagacttccttatctttatcataaaagcggtaggacaatcctgatttaccagcaccgatataaacggtctttgcggtgtcgaaatcatcaaacttgctttcgtcaaagtggtagccctcactattcgagataaattcctcttttttgcatttcttctttatctgctctatggtaaagaatggcttttcgttcttatcatcaatggcaatatccagtcttgtgaaatggaaattatccagtccgtatcttcgctcacagcgtcggaacatatccccaaaagtataattcctactgtcgagaatacggaaaatatcatcacaacctctgccagtcataacaagataacagcctagcccctgtgggttgtcctctgtctttcttgcgtcccccgatacataaatatctccaatctgccagcgtgcttgatacgtcttgaatttaacgcttgccggatagacattaaaaatatcagttggtaaacctaaaatgtgcatgattacatcttcagcggttacagtatcaaatacaatgctgatgtaatcaatcttaacggataaatttttgtgtgtagttatagtgcatttctcctttcgtatgccccgtttttttgcggggtaaaaattgtgttttttcctttatttatcacagtttctaggtactatgacatgtatacgcagggcggtgttacatatacgccctttatgaacgcctaaaggcgttccctttcttcctgtgtctgatccgttcttaacgctcacgagccttgtaagactcgtggctaaacggaacagccccagtcagaaaccttattttcggtctgatagtccatgcttattcatgctatcaaaatgaaaatacatcttttctatgcttactcaagcgtgtgattgaccctagcgtgcttaatcaccctatctaatacgataataacgccattagaattacttgtcaagaagttttgattgactttttaataaatattaagtatgatatgcttataaacaccgagaaaagcaacgaaaggagcggttatactaagttatggaacattacgaaaagaaaatcagtttcttaggagagaatatacagaccataagaaaacacagaggaatgaaacaacaggaacttgcggataaaatcggtatcaatatgcagagcctttccaagattgaacggggtgtgaattatcctacctttgacacattagaaaagataatggacgtgctgggagtaacgcccaatgaattattatcaggagaatggaagtatattgaccacaccgaaccatatatcatggatattatcaaacgggaacaggacttcaatgtttccttagattatctgtctgaaaatgaatttttcaatgatgaaaaagaatgcagattttacatggaaaccaaactcatacagtatatccataactacattaccaatgaggttacggagttagaagaacttatggaaatcaagcagttgatacaacgtcaaaaaatagaacgcatgatgaaagtacataaggaaatgcgagggttagaccgatacagagaacagcccaaagagtataaataccatgacccttatgatgactggatattccgtcaacttgcggacatagacagcagaaataacattcccgacacttcgccacagttagattttgatgaaacggactatgaagattatctgaaagagaaatggaacagaggtctttaattttcctcttgaatgaaagatacagcaaacaaaaagcccagtaaagagtgcaaagcaccaccaatggtggcatggctcttgacagggctttttcttttctgtggttggtaatcaagaggaagaaagaaaaagtgtgtatttttcaagacagaaaaatgtcaaggggggtgtgctgatttttgttgtggcggatatatggaactgttataatatggatatgtttaaattacgttataagcaagaatattctgctgatttgtcaaaaaacatcattgcaactgccagttgacatatttccatatctaaatggtggctatgcaactgataatattgctaaaattacaccatgaaagaaaggagtgttagctaatgaatatggcagacagaatacaatatttaaggaaatcaaaaggaatatcacaagaggaacttgcggataaagttggagtttcaaggcaggctgtttctaaatgggaaagtgaacaaagtacgcctgacttagaaaaaataattataatgagtgatttttttggagtaacaactgactatatcctaaagggaattgaaccagtagcagacaaagaacaaaaaaataaagagcttacgagtaaggtactttatatatcatcaacagcttttgttgctattgggctgttttgtgcatttggtaattggtatgcagaacaaacaatggaagcagtttggggttcaatgattattcaagctatagggattgttggatattttatagcgagaatactatcggaagaaaaatcccccttttatgtaaattggcttaatataatcggagttgcttttatgcctatttctatgattacaggatatatttcaggattggttttcaaactagaagggtggattgcaccttatccgataggaatatttcatactttagttttcgtgttagtattctttgtagttgtgattgcaagctatattattctaaagaaacaaacaaaatagtgattacctttattttgcaaaagcagttagtcttaggattgactgcttattaataaaagacaccacttcaatgtgtcaatggtgtctttttagtgctattttatcgtcatatcaaggctcgttcaatcgtggtatattcgtggtaaaatgagtgtttttctatacttcgaaatgcttgaaagtgtaatatttatagggataatcaaaaatcagatataaagttattcaaaatccttcttgaatttagcatgatgaagtgctaaactcttaacataaaaaacagagtgcaatctatttattgatgagtgcatctgaattatagttaagaaagaaggataaaaaatgaacggagttataatgatggtcattgccatcgttgtattaggtggaggatatcttttctatggaagatatcttgagaagaaatggggaattgacccgaatgcaaagactcctgcttatgagctggaagacggcgtagattatgtgccggcagatacgaatatcgtatttggtcatcagttcgcatctatcgcaggagcaggcccgatcaacggaccaatccaggcagcaatctttggatggcttcctgtgcttttgtggattctgatcggaggtgttttcttcggagcagtgcaggattttgcatccatgtatgcttctgtaaagaacaaaggacgtacaatcggttacattatcgaagagtatattggtaaacttggaaagaaattattcctgttattctgctggttattctgtattcttgttgttgctgcatttgcggatgtagttgcaggaacattcaacggattcgtagctgatgatgcaggaactgtaagtaaagtagcagcaaatggtgctgtagcaacaacctccatgcttttcattgtagaagccgtggcacttggttgcattttgaaatatgcaaaactgaataagtgggttaacacagctattgcaattgttatgcttgtcgtagccgtagcgcttggactttattttccaatgtatctgacaagagagacatggcatatcctgatctttatttatattctgattgccagtgtcgcaccggtaacaatgctgcttcagccacgtgattacctgaacagttacttgctgatctttatgattgcagcagcagttgtcggagtatttgtagcaaatccatcctgtaacctgaaagcttttacaagcttcaatgtagatggaagttatatgttcccaattctgtttgtaacaattgcatgtggagctgtatccggattccattcactggtatcttcaggaactgcttctaagcagattaagagtgagaagaacatgctccctgtatcttacggagcaatgatcatggaaagtatgcttgctgtaattgcactgatcgcagttgcttccttcgctgatggtgaggcagcagcacagggactgacaacacagccacagatttttgcaggagcaatcgcaaacttccttgaagtgatcggattaccgcattctcttgtatttacactgatcaaccttgcagtatcagcatttgcactgacatcacttgattccgttgcacgtgtcggaagactttctttccaggaattctttatcgatgatgacacagatatggataatctgccattgtacaagaaagtagcaaccaataaatatttctcaacagttattacattggtacttgcatacttacttgcaaaggttggatatgcagaaatctggccactgtttggatcagcaaaccagcttctgtcagtacttgcactgatcgcatgtgcagtattccttaagaagacaaaacgccagggagcaatgctctggattccaatggtctttatgatggcggtaacatttacagcacttggaatgacaatctgtaaactgggaggtcagtttatgacaacgggtctgagccttggaaatacattacagctgatctttgcagtactgcttcttatccttggagtaatcgtagcaattcagggaattaaaaagcttacagagaagaaagaagctcaggcagataaagttgaggatacaactattttggaataagcagaatagttaataaagagtaagagacaagatcttcatgcagacttaaaatgtctggcatgaagatcttttttctagttatattcaattgtactcaaatagaaacaggttaaagtatagaaattttacatttgtcgggtgtatactaagtcgtaatgtgaaaagacaatctaagtagtaacaagatcagggggaatataaatgaacgcgaacataaatcaaaaacatatgttcagtaataagatgatccgtgctcttttagtaccaatcatactggaacagttattgaattccatcatgggtaccgcggatacgatgatggttagtaatgtggggtcagcagcaatctcagcggtatcattggtggattctattaatatattagtaatccaggcattttcagcattagcagccggaggtgcgatcgtctgcgcccagtacattggacaggggaataaagaacgggcaaatgagtctgcacgacaggtactatttatcatcactcttatatcagtagctgtcagcgcattttgtcttatttttcagaaaccgttacttcacctgatttttggagcagttgaagcagatgttatgagagcatctgaaatctatttcttctacactgcattatcatttccgtttattgcggcgtatgatgcagcggcatcgatcttcagggcacaggagaacacgagagatccgatgctcatctcaatggtatcaaacgtgatgaatattgtcggaaatgcaattatgatctggggtttccatatgggagtcgcgggagctgcactggcaactttgatctcacgtattttctgtgcagttgtagtattggcagagcttcgtcaggatcgtcagccaattgtggtacgagattatctgaaaatccgtccagactggagaatgatccgcaggatccttgggatcggaattccatccggtgtggagaacagtatgttccagttaggaaagctggcgattcagtccacagtatcaacacttggaacaacagcaatcgctgcgcaggcaatgacgaacattctggagaatctgaacggaatcggtggtatcggagtcggaatcggattgatgacaattgtaggtcaatgtctgggagctgaccggaaggatgaggcagtttattacatcaaaaagctttgcgtgattgctgagatcgttatggctgcgagctgtgtgattgtttttgcactgacgaaaccaattacgattctcagcggtatggaaccggagagtgcgaagatgtgtttccatatggtaatgtggatcacaattgtaaaaccgcttgtatggattatgtcgtttatcccggcatatggcatgagagcagcaggagatgcaaaattttccatgattacatcctgctgtacaatgtgggcatgcagattctgcctgtgtgtatttctgatccgtgtaatgggatttggcccgatgggagtatggatcggaatgtttgcggactggacggtcagaagtattattttcacctggcgattccacagcagaaaatggctggagcataaagtaatttaaataagaagagaaatctgaacaaaaagagaaatccaaacaaaaatagaaacagcagggttactgtcgggaaagcattttaataataatgcttttggcagtagccttgctgtttcttatgtctgctattttttaaatttgatctttaatatcctgatagatttatgctttgtgtatgattctcaagaattactcttcaggtgcaagctctgttgtctgcttctttggaggcataaccagtgagaagataaggaatgcgatcaacgcagcaaccagtccaggtacgatcggctgattgaagtgcagaccgaacagatttcctttggaaatatgctccagatatactacaacaatagttccggcgatcagagaagccatggttcctgcctgggaagctcctttccagtaatgtccgagaacatatgggaagaaagaacctgcggcacgaagggtgaaggcaaacatcaggattgtaacaatacttgaagtattaaataatgcaatcagagtagcaaaaacacctacagctgccattgtaacacgagttacgatcatgatctctttatcagatgcgctaggcttaatcacaatcttgtaaatatcatttgcaaagatcgatccggcaccaagaaggtctgagtcggcacttgacattgtggcagatacgatacctgcaaataacaatccgcagataactgccggcattgcttccatagcaagaaccggaagtgcataacgggcaccaacatcctggaagtctgcagcattgaatttgcccatgttgatcagtgcaagtacgatgattcccataagtgtcggaacaaaagcgtagataaagtttacaatcgcagcaaggacagatccctgtcttgctgctttcccgtctcttgcagcgtaatatctggatacagcttcctgtcctacagtaaatgtagcaacatacatgattgttaaactgataacatccattacgttataacctttaaacatgtcaaatgtttcagcaggaacattagctacaacattgtcccatccaccggcaagattcattccaaatggaagtgcgatgatcattccgatcacgatcaggaatacctgaacaaagtcagtaagtgtaacactccaaagaccacccatgatcgcataaattgttacaacgacacctacgatcagaacggctgttttataattcagattcagcatagtagacagaataacggatgatgcgataaactgtccggctgtcagtccgatcaatggaacgaacatgatcaaagatgtaatgattcctgaaggttttccataacgacggcggaaatattcaggaacggttttaaccatcgcagcacggaattttggtgcaaggaatgtaaggatcacaaaagcaaatcccattgtgataatgtaccatgcggcactgagtccgtgactttccataccctgctgaacaacaccgagagaacttcctccaccaatctcagtagcagcaagagttccggccattaaaagcggtccgagtcgtcttccggcaacaacgaagtctgtgttggattcaatcttcttggatgacagataaccgatcaataacataacaagaagataaataacaacgacagcggttacgataatgtttgactgcataaaatatccctctttcctttagtcaaatttgaaaaaggtatcaggaaatagcgaaacctgacacctatgttcatacgaataattataccataaaaactttcacatgcaacctgaaaagagaaaaaacttattgaaaattatcaatatttccggaagataatcgattggtatagtagatattaacaaaaataataaaaggtgagaggacagcgtgaaaaagatcatttttttgggggtggacatttgacgtttctattattacaattataataatcgacagaaaagaggaattgtatatgacacagatagatgcgttaaaaacagatgaaatacagaattatgagatagaacatcaggaagaagtgcgccgtctcgcaggcgagtgtatggtaattttggaaaatgacggagtccttccacttcaggctggtacaaagaagattgcattattcggaacaggagcaagacatacgatcaaaggtggaacaggatccggtgatgtaaatgtacgtgaaaacatttcgattgcacaagggcttgagcgtgcaggatttaaatttgtaacagaaggctggctggatcagtatgacagactttatgcggatgcgcaggaagcgtatgcgaaaaagttaaatgaatttacagagaaaacaggaaaaccatcgatgctatatgccttcgagaacccttttgaggaaccggaacagccggagattacagaagcggatgtaaaagaagcggatgcggcaatttatgtaatttctagaaattccggagagggaaaagaccgcagggcagagaagggagattattatctcagcgacagagaacttcagaatatccgttttatgacagaacactataagaactgtattgttcttttgaatgtaggtggagtcattgatctgacttcattgaaggcaattgaaggtgtacaggcaattatgcttgtgggacagacaggaaatatgggaggttatgcagttgctgatgtgctgactgccaagacgattccttcaggaaagctgactgatacatgggcaagatcttatgaggattatccatcctctgcaacatttagccacagggatggaaatcttgacgacgaatattacagtgatggaatctatgtgggatatcgttattttgatacgtttggtgtgatgcctctatattgctttggatatggaaaaagctatacagaatttgaaataaaaacaatgaatgtaacagcagatgaaaagcaggtacaggttgaagttgaggttacgaacattggtgacaaatatcctggaaaagaagttgttcaggtttattattccgcaccggatggaatcatggagaaaccaacacaggaacttgcaggatttgctaagactaaattgcttgcgccgggagaaaaagatgtcgtgacgatcacatttgcaacgacagatatggcatcttttgatgcgtatgatgcggcctgggttatggaagaaggggaatacacgatccgcgtaggaaacagttcacgtaatacggaggctgtggcagtcatcgaccttgatgagcaggtgacaacactccaactgaaacgtctgatgcgtgatacaattgcagtcagagagcttcaccatatgattccgattttcgatattgaatttgatttcggtgtgccggcgattccatttagaattatgcttcaggcagagaactttaagaaagaacttgtagaatatgaagtgatgcgcaggacacttatggataagaggaaagatgaagttctgacgctggaagatgtaaaagcaggcaacgcgactctggatgacttgacagcgcagcttaccgtggaagaaatggcagaactttgtgttggaacagagagaagaaatggcgacggaaatgtaattggttcagcatcctcctgtgtgccgggtgcagcaggagacaccacttccagtttacttgaaacacgaaaagtgccgaatcttattcaggcagatggaccggcagggcttcgtttagagacaccttgtactgccattccaatcgcaacaacactggcacaatcctgggatatggatctgattcatagaatgggagagcttgtcggagaagaaatgaagcagttacatgtagatctatggcttgcacctggcatgaatattcatcgtaatccgctttgtggacgaaacttcgaatactattctgaggatccggtattgacaggtctttgtgctgctacagagacgaaaggtgttcagtctcaaaaaggaaagggaacaacaatcaaacattttgcaggaaataatcaggaagacaaccgtatgtttacgaatgcacatatcagcgagcgtgcgctgagagaaatctatctgaaaggatttgagatagctgtaaagacagcacaaccatatgcaatcatgacttcctataatctgatcaacggagttcattcagcaaacaactatgacatgctgcagaacatcgcacgtgatgagtggggatttgaaggtcttgtgatgacagactggtatacttcacaggatacaacagagatgggaatggtatcaccatccggaaaatatagtcattccagcagtgtacagtgcattaaagcaggaaatgaccttcagatgccgggatgtcagcagaatgtggatgatatcgtagaagcagtgaacgaaggaaaagaaattaccaaagcagatttacaacgctgtgcgaaacatattttaagtgttgcacttaagacaatgtaaaaccacctcggtaatatggaaattgagagtctttttcgtattactcaaaaattaataaacaatatcgtataagatcaagccttttgtgtcgcaggatgcagaaggcttttcctttccttccaggatcgcattgatacattcgacgggtcttttccctatgccgatatccaaaagcgttcccagaataaatggagccatctgatagagaaaatcattggctgtcatacgaatataaagcgtagactcttctgtgacaaaagtaattgtttttatttctttttcggttcctttcttttttcgaatcgaagagaaatgtttaaaatcatgctttccaagtaatgagtgggcagcggtttccataagaagaatatttggaagttctgctgtttgttcaggtgacagatcaaataatggatctgataacagatcagttaatcgaccgcgataatttttgtggaacaggtcatagatcggtgataaatccatggcatattcataagtgatctcgcgagcatttaagtctgctcgaaagcgttcgggtgttgatactgcatctaaaacggcaatatcctgtggaagatactggttcagaacagttttaaattctgcaggagtcagttggctttctgtaagaaaattgactgtgagattccgagcatgaactcccggttctgttcggactccggaaaataaagtgacaggagttcctgttactttttctaatacattttcaattttataagatactgtgcgatcattgtggtctttttccgggcgtttccaaccaagataacgtgtaccgtcatattggagtgttaatttaatattctgcatatatcgttctccatttataaataatgtctgtttccagacaagtcatcctttgtattttaactgatgcagatggaaatgtatagagaaaagaagagaaataagactgcaaaggcgaagagagtgattctgattttatttaaaatgtttccgaaagatatttttggtcatttccatcatgcggtcaatttgattttgttcttctttgcttttaccttcttttaatacttcaagaattaatgaaacttcatccggattgaaacgaagtccctgtcggtttgcatttgtgataagtgcgagcatgaccggggcaagttcatttccggattttcctttcgtctgtttcgcggctgtcctgatcagttccagcttgagcggatcgatcgttttcattgcaggatggttcatccagttttccattgttaagatctcctttcggtgagttattgtttatagtgtcttctggctcttcatcagaaggtggagcagatgaaaagaattgtgtaaacatatctgccatagacatcatctcttttatgtttttgaaagtagaaaagagctgtttttcttctgatgtgagataaggtgacagatggtcaaaaatagaatctgcgttgtcttgaaaaagattttctattcctcgtccagaagaaaagtcacaggcagaaagtgcatcataactgacaggagcctgctggtgaagaacattttgcagttcgatgaatttaatgaagacggcaagcatgctctgtgtagctggcgggaaaagaggaaggaaaagtttcagcatgcgaagtccggaagcagttgcttcgtcaaagggggtcataggcgtcggtgttttcaaaaaaataaaccctcctgactttcagctgaactgatacatatatatgaaatgcagaaaaaatatattcctgttcatgaatatagatgtgtgaaaaatcggatcatgcgtatactgaattaaagaccttttgtaatcaggggcatatcttaataataagaagaggaaaggaaaacgaaaatgtccagaaagttaattattgatgggaatgcagtatatgaaattgatgagaagtgtatgttaaagaaaaagcttggagaactgaaagaaaagaagataacatcagacgagaagagagcggaacagagtgttgttaccggaaaaccgaatcgtttgaaaagataagccagaaggggcatgcggtttttccgcatgccccttctgaagtggaagaaggaacagatatcagcatccgccacagttgcagccattaccgcaaccgccgcatccgaagccattattgccccatccgccgcagcagcaaagaagaaggatgatccacagacaactgtcattgccgcagccattaccacatccaccacaaccattaccaccccagccaccgcagcagcagaggagaaggatgatccacaggcaggagttattcagtccacatccatttccgtttccgccacagccgcagctgtttgcacatccgttgtcacaaccgcatccgcagtttgtagctgttaattcactcattgttaaatcctccgaaagattttttgatttacaatgttatagtatgcggagaaaaagaaaatgtgagatgagaaattatttgtagtgataaagatgtgaagtggcaaaaattattcgagcagccgggaaaaatctaaaattccccagccggattcagttcccggaatctgcacacaggaagcgtgaagttttaatttaacttctgcattggtgagaaacgggtattttgaaagaagacaggcaattgcaccggaaacaacaggagcagccatggatgttcctgttttggaaagataaggcggagcatttggaaattgagagtaaaaagcattgcagcttacaattcctgtgccgggggcaaaaacatcaggtttgacaatgcaatcatctgtaggaccgtggccggaataattgagaggatgcctttgggtgtggatcagaggaaaagtgtcgggaacaccaacagtgataactttcgggctgcttccgggaactgtgacggaaccgggagcaggtccgtagttgccggcagagacaactacgacgagcccaagatcccagagggattctacagcattcaataaaagaagtttttgatgaatggaaagatccggtcgtgtacctacggaaatgttaatgatccggatatggaattgcgtgtagatatcacggatccattgaattccatttatgacatttttgatagatccgtttccattctgatccaatactttcccaataataagattgcagaagggagcgattccggcataagttccggaagagagaagtccgcttcccgcaagaattccggctacatgggttccgtgtccactattgtcgatgagaggggagaaatgagagaaagaaaaaagaactttttcggaagaaccagtggtactggaaaaatcccggaaagaaaggatacgatctttaaaatcaggatgaggagaaattccggtatcaagaatagcaacagtgacattttgtccgagaaatttgtgttcctttgtgtccggacaccagtagtgaatggattgttttacccatttcatgaaggaaaagcctttgttttttctttattatatgcctgatgctaaattagtgataaagatgtctgtactgtaaagaaaaaacacttgacaccatcttgtgtttcgtgtatgatagcagaggtgaagataatgaataagtttttagagcaggcattattgtttgatttctacggggaattgcttacagatcatcaaaaggagatttatgagcagttcgcgctggaagatctttcgctcagtgagattgctgagatgaaggggatcagccgccagggtgtacatgatcttgtgaagcggtgtcagaagacactggaaggatatgagatgaagcttcatcttgtagagaagttcctttccgtgaaggagaaggtcagtaagattgatgatacacttgcagagtgggaacgcgagaagaatgacccggaagagatggtgaagcggatccgtaagattgcggatgcgatcatagaggagttatagaatggcatttgacagcttaagtgaaaaacttcagaatgtatttaagaacctgcgaagcaagggaagactgacagaggatgatgttaaggcagctctgaaggaagttaagatggcgcttcttgaagcagatgtaaacttcaaggttgttaagggcttcataaaggatgttcaggagagggctgttggtcaggatgtgatgaacggactgaatccgggacagatggtgatcaagatcgttaatgaagagctggttaagcttatgggatctgagacaacagagatcaagcttcaaccgggcagtgcaatcacagtgatcatgatggcaggtcttcagggagcaggtaagacaacaacaactgcaaagcttgcaggaaagtttaagttaaaaggtaagaaaccacttctggtagcatgtgatatataccgtccggctgcaattaagcagttggagatcaatgcagagaagcagggcgtagagatgttctccatgggagacaagaataagccggcggatattgcgaaggcagcagttgagcatgcagcaaagaatggtaacaatattgtgatccttgatactgcaggacgtcttcatgtagatgaagatatgatggcagagcttcaggagatcaaggaagctgtggaagttcatcagaccatcctggttgtcgatgcgatgaccggacaggatgcggtgaatgtagcaagttcctttaacgataagattggaatcgacggtgtgatcgtcacaaagcttgacggagatacacgaggcggtgctgcgctgtctatcaaggcagtgacaggaagaccgatcctttacgtcggtatgggagagaagctttctgatctggagcagttttatccggacagaatggcatcccgaattctgggaatgggagatgtcctttccctgattgagaaggcaggcgctgagcttgatgaagagaaagccaagaagatggctgataagatgaagaaagctcagtttgactttgaagattatcttgacagtatggaacagatgcgtaagatgggcggtttgtccagcatcatgggaatgctgcctggaatgggtaatctcggaggtaagatgcctgatcttgattccgaagagaatgagaagaagatggctcagatggaagcaatcatctactccatgactttggaagagagaagaaacccggatctgctgaatccatccagaaagcacagaattgccaagggtgcaggtgtggatatcgcagatgtgaaccgtatggtaaaacagttcaacgaatccagaaagatgatgaagaaacttcctggaatgatgggtggcaaaggtggaaaaaggggcaaattcaagcttcccttttgacatataaatgaaacaataacaaaaaattaagaaaaattatgaggtgaaaaaaatggcagtaaagatcagattaaagagaatgggacagaagaaggctcctttttacagaatcgtagtagcagattctagatctccaagagacggaagattcatcgaggaaatcggaacatacgatccgaaccttgagccaagcgcaatcaaagtagacgaggaagcagctaagaaatggctcaacaatggtgctcagccaacagaagttgttggaaagatcttcaaagcagcaggaatcgagaaataatcgaatctgtatgagtaatgtctgtagctgagtgatcagctgcagataaataacgatgtctccgcggagggcgagtatcatgaaagaattagttgaagttattgcaaaggcactggtagatcagccggatgaagtctcagttactgagaaaaaggaaggcagaactattgtactggaacttcatgtagcagatggcgacatgggtaaagtgatcggtaagcagggtcgtattgcaaaagcaatccgttctgttgttaaggcagcagcaacaaaggaagacaagaaagtcgttgtcgatattgtttaagaacagtatcaggacgaaagaaaaaagtaacagagtcattgcttggtaaagcagggcgtaaaaaagggacagccttcataaagaagagactgcccctttctttttacgcgagcaacgagtcaaagtccgtgcttgcacgagaccttggcgactgccgcgataacttgagaaactcgcgaagtgtgtttctcatagtttcataagaaaggaatcaggaatggaacaatttcttcaggtgggagtgatttcttccacacatggtctgcgtggtgaagttaaggtattcccgacaacggatgatgctgcgcgttttcagacattgaaaaatgttgtccttgatacaggaagggaaaagttggatcttgagattcagtctgttcgttttttcaagcaatttgtaattgtgaaattcaagggcattgacaatatcaatgatattgagaaatataaaggaaaaagtctctttgtaacaagagaaaatgctgttgaactggaagaggacgagtattatatcggtgatctgatcggtatggaggtctatacagatgacagtgaggaacgctttggagtactcaaagacgtgatggagacaggagcaaacgaagtgtatatcattacttctgagaatcacggagaagtgctgcttcctgcaattcacgagtgtattctggatattgatgtagaagcgaagaagatgaaagtgcatctgatggagggattactgtaatgaatttccatgtattgactttatttccagagatgatcgagcaaggtgtgaatacaagtattacaggccgtgcaatcaacaatggacttctttcgatcaatgcagtgaatatccgtgattatgcatttaataagcataacagtgtggatgattatccatatggcggcggtgcaggcatgttgatgcaggcagaaccggtgtatctggcttatgaggctgtgaaagagcagatcgacaagagaaagcaggagaacatcaagtcggaagaagtcacgtcaacggaaccagcggattgttctgaagtgcgcaacagtgatttgcaggatgaaaattcgaagaagcgtccactgcgtgtagtctatctctctccacagggagatgtatttaaccagaagatggcagaggagatggctcaggaggaagaccttgtgttgctttgcggtcattatgaaggaatcgacgaacgcgttctggaagaaatcgtgacagattatgtttccatcggagattatgtactgaccggaggcgagcttccggcaatggtcatgatcgatacgatctcaagactggttccgggagtgcttcacaatgatgtctcagcagaatttgagtcatttcaggataatcttctggagtatccgcagtattccagaccggaagagtggagagggaagaaagttccgcccatccttctgtccggacatcatgcgaatattgaaaaatggagaagagagcagtcaatccttcgtacaatggagcggcgcccggatcttctcaaggagagtaatctgacggataaagagaagaaatggatccgccaggtgaaacgggaacgcaaagaagcagaaaaaataaaatagggacttgaaaaaagcccggaaatatggtaaactacaaaagttgtgaaaagaagcgcgatggtcctctggcacaaaagtgaagtgttaagaacgtcaaatattaaggaggtcacacaaaatgaacgaaatcattagaaaaatcgaagcagaacagttaaaggagaacgcacctgaatttcatgttggtgatacagtaaaagtatatgccaagatcaaagagggtaaccgcgaaagaatccaggttttcgaaggaacagtcctgaaaagacagggtggcggagcaagagagactttcacagtaagaaagacatctaacggaatcggtgttgagaagacatggccggtacattctccacatgttgagagagtagaagttgttcgcagaggtaaagtaagaagagcgaaactgaactacttaagacagcgtgttggtaaagctgctaaggtaaaagaattagtaaaatagtaactatgagagggacaattacagaacttgtatattgtcccttttcttatagcttacgcgagcaacgagccaaagtccgtgcttgcacgagaccttggtgactgccgcgataatttgagaaactcgcggagcgtgtttctcatagttgggaaggaaaataaggaacctatggggcagaatctgagttttcgaaagaataacagaagaaagaaaaagaagaagccgcagatgaagaagaaaaaccatctgaaatttacaaaccgaagtaagaaattaaagtttgaaaagaagaattatcatataacaaagaattctttgattctcgcaggagagatactgtgtgtgtgcctggtggcagtacttttaatcgcatttttcgggcatcgtgtaagcaatgcgggagatgccatgagtccggcaattgagaatggagaggttgttcttgtagatcgtctgatcgtggatatgaagacaccttccagaggaactgtggtggcatttcgaccagacggaaaccgcgaagttcatcttttaattagaaggattgtcggtcttccgggagagactattcagatcaaggatggaactgtttatattaatggaaaagagcagaagaaacatattcatgtatcagagataaaagatgcggggatagcttctgatgagataaagcttggcaaagacgagtactttgtgctcggagataatgaagagtcaggcgaagacagcagatcggagacggtcggagtggtaaaggcagatgagatctatggaaaggtctggttcaatgtaagctccggggaacatttcggatttgtaaaaagataaaatagaatgaaaaaataacaggaggaatgcaatgcattttcagtggtatcctggccatatgacaaaggccagaagaatgatgcaggagaatattaagctgatcgatctgattattgagctggtggacgcaagagtgccgctcagcagtcgtaatccggacattgatgagcttggaaagaataaggcgagactgattcttttgaataaggcagatcttgcggaagacagaagaaatgatgagtggatggaatatttcaagaagcagggatattctgtcgtgaaagtgaattctaagaaaggcggcggaatcaagtcgatccagtctgtgatccaggaagcatgtaaggagaagatggaacgtgacagaaagcgtggaatcctgaaccgtccggtacgtgccatggtggtaggaattccgaacgtaggaaaatctacctttatcaatgcgctggcaggaaaagcctgtgcaaaaacaggaaataagcctggagtgacaaagggaaaacagtggatccgtctgaataagaatgtagaacttttggatacaccgggaattctctggccgaagtttgaagaccagacagtaggtttgcgtcttgcgtttatcggttcgattaaagacgagattcttcagacagaagaactggcaagtgagcttgtgaaatttttaaatcagtcatatccgggagttcttgaagagaagtacacgatagaatcttcagaagataattatgaagtgttaagaagaattgcagaaagcagacactgtctggtcagaggaagcgaattagatgtggaaaaagcagcggcaattcttttggatgattttcgtaatggccgccttggaaggcttacactggagcttccagaggagaactaatacggtatgaaagaaattataaaagaactggctggatggcttctgtatattgtgttgatcatcgcttttacctggtgtgtggtcacttttgtaggacagagaacggaagtcagtggttcttctatggaaactacgctgtcagataaggatcagctgatcgttgacaaaatgacttaccgattcagagatccgaaacgatatgacatcgtagtatttccatatcaatatcaggacaatacctattatattaagcggatcatcgggctgccgggagagacagtacagattttatccggaatggtttacattgatgggatgcgtctggatgaacattatgggaatgaaataatggagaatccaggcattgcagaagaaccattaacacttggtgaggatgaatattttgtacttggagataatcggaataacagcagcgacagcagagcgtccgatgttggtttaatccatagaaaagatctgatcggaagggcatggattcgcgtgtggccattgagtcaaattggagtgatacatcatgagtaaaagtattagcgagatcaagatagaatttgaacaggcaggagaacaacagtgggaagcactttgtcaggaatacgagacggattccagaacaggtgtaaaaaatctgacagcaagatatcggaagaagcagcaggcacttgttcaggagagagaacgccttgaggtaatgaaaacattcgagagaaaatatgcggattatagttttatctgtgggattgacgaggcaggaagaggtcctctggcaggaccggtagtagccggtgcagtgattctcccaaaggattgtgagattctctatctgaatgattcaaaaaaactgtctgctgcaaagagagaagagttgtatgatgagattatggagaaagcggttgcagcggcagtaggtatggcaagtccggcgagaatcgatgaaattaatattctacaggcaacttatgaggcaatgcgtgaagcaatttcaaagctggcagtagaaccagggattcttttgaatgatgctgtgacgattccggagatgatcattccgcaggttccgattattaaaggagatgcgaagagtgtgtctattgcagcggcaagtattcttgcaaaagtgacaagggatcggctgatggtagaatatgataaagtgatgccagagtatggatttgcaggccataaaggatatggatccaaagaacatattgaggcaatcaagaaatatggaccgacaccgatacatagaaagacatttatcaagaagtttatttaatgatatcagggttgtataaaagaaagagctgccaatggcagctcttcttaaatccgaaagttcgacggattagaagaagggaatcaggtagatgaaggatccgaaaaaagaaaagaataaccgcaaaacaggtggaaactatgagcaggcagcaggtttttatctggaacagcatggctatcagatactacagtacaattatcgctgtcgcataggagagattgatattgttgcaaaagagggggagaatctggtattctgtgaagtgaagtacaggactggtcctggcaaggggagtccgctggaagctgtagatgcaagaaagcagagaaagatatttcaggcagcaatgtattatctgacggaacatcatattagtaatgtcccatgcagatttgatgtgatcggtattgaggggacaaggatccagttggtgaagaatgcattttgcggatagagaagaaaggacagaatatgagtttaggattgatttataagaacgcggcacatatttttgatgaagtagaaaagaaaactccttatctggaatatccattgtttcaggagacgggcattgtaacgagtgctttttctacacgacttggaggagtcagtgagggctattattcttctctgaatctaagctttgatcgtggagatgacccggcaagggtattagagaattttaaaaggattggagcatcaatgggcgtcgctgtagaagatatggttctgtcaaagcagacacatacaacgaatgtccgtgtggttacaaaggaagataagggaaaaggtgttatgcgggaacgcaattatacagatgtggatgggatgatcacaaatgttccgggaatctgtcttgtgacttcctatgcagattgtgtaccactttactttgtggatccggtgaaaaaggcaatcgggctgagtcattccggctggagaggaactgttggaaagattggaaaaaatactgttcagctgatgcaggagaattttggatccaaaccggaagatctgcttgcagcagtaggaccatcagtatgtatggattgttatgaggtcagtgaggatgtaattgagcagtttaaagaagcttttgaaaagaaatactgggaggatcttttctataagaaagagaacggaaaatatcagttgaatttatggaagacaaatgagctgatcttcctggaaagtggaattctgccggagcatatggcaattacaaatgtttgtacacattgcaatagtaagatcctatattctcaccggacgatggggaacaacaggggaaatctgtgtgcatttcttgcattaaaataaggaggttaaaagtatgtatctgacaacagtgaaagaacttggaacagcattactgacaaaggggacagcctttgcactgacccaaacagcaacgcagacgaataacagttccgtcaatgatgtgcttgattctgcacaggaagtaacagcaagcacagcagatgaagtgaatcgctttgtacaatattttaatgataatattccgaatctgattgcctttgggttgaaggtgattttcgcgatagtattttacctgatcggatctaaggtgatatctgttatacgtaaagtggtaggcaaatcaatggagagatccaatgcggatgttggagttcgtcagtttgttgattctatgttgaaatttgggttatacgcacttctgatctttatgatcgcaacaaaatttggcgtggaatcttcttctgtagcagcgatcatcgcttccgccggtgtggcaatcggtctggcattacaagggagtctgtcgaactttgcaggaggtatcttgattcttcttctcagaccatttgcagttggagattatattattgtgaattcagagggaatcgaaggaactgtaaaggtaattcagatcttctatacaaagatgacaacaatcgataataagacgatcgttgtgccaaacagtattctgacaagtaacagtctgacaaatgtaacagcaagaccggaacgtcagctggaccttaaagtaggaatttcttatgaatctgatctgaagaaagcaaaagagatcgtagagaatcttctactgaaggatgaagatgttattcaggatgaagagattaaagtgttcatatcagaacttgcagacagcagtgttgtgatcggacttagagcctgggtgaagacagaagcttactggacaacgcgctggagaatccttgaggagattaaaatgtcttttgatgaggaaggcattgacatcccatataatcagttgacagttcatatggcaaatcattagttattatttattagaatgataaaagtctatagaagtctatagaagttgattaaaaaagtggttgaaatttatatccaaacgcgatataataacaaaggtcgtcagaattgacgaccatatgccgaaatagctcagttggtagagcacttcactcgtaatgaaggggtcgtcggttcgagtccgattttcggctgaagagtaaagaccgttgttgatttcagttgtatctggaatcagcagcggttttttatatattaggaaagttctttcctaatatataaaaaacgctccgcttaggatgcgcacttataacaaacttagaacggatacgaaaaatcatcttgacgaaggaaataaaaatggatacaatattgttacgagtttataaaaaaagatgaaaaattttctctaataaagtaaaaagaaataaaattaattcttttaaaacaagattagacagaagcagagaaatagaaaaaatacagagggtgaaaatatggcatcagtacagacaaaagattacattgtgcagttaattaaagaggagattctttcaggagttatgaaaccgggggaagagctggcacaggaagcacttgcagagcgtcttggtgtttcaagaatgccgatccgtgaggcattacagaatcttgttcaggagggatttgcggtacgtcttccaaaccgtcatatccaggcagtagttttgagcgcacagcagattcatgatgtatttcatgtgattgcagcaatggcagcagagaatacgatcttagttgcaaagaaagagcagatgcttcgaaggaaaaatgtggaacaaacgagtcagacagaattcgaagaagatggacagagcaagcttttccttgagcaagagattgagaaaactccaagcgagcagctttttcagatactttccggcatggagaatgcattgagaccagagaagaaggcagagtgggagatggtttatcaggagagactcatcagtttgtttgagaatccatatctgtcacagcttcaggggaagacgatggatggttatgtagcttatgcaattgagaagatgggagataagcagcagaagttagagcagcttcgccgtatcacagaaggtattgcagagaataatgagcagaagatccgaatgggacttcgagaatactatctttcttatgctgatgcttttgtagaaagatgggagaagaaggcagaagaaacagaaaaataggttgaattgttataggggtgattacatacatatttaggttgtaatcacccctttttctataaacaaagtcttatctagatttgttagtgagcaattgctatggtagcaaagacacctcatgttcgtcattttatacaaactgtgttaaaaaaacactggattatatctcaaatatgatgataaaatataaatcagatgatgggttagaaaattggaaagggaggacgatggaaaaagcacgacaagtaaaaagagtcctgctgcaggcaattaagatcgcggtgggcagcagtgtagcaatttatctagcacatatactgggattggagtatgaggcatctgccggaagtatcacactgcttacgttggtaacaacaaaatgggagacggtgaaattatctttttatcgtatggcgacatttgttttggcggtagttctggcggcgttgacatttggacatatgacgagttcctggcttgcgtatggaatctatgtatttctgatcgttgcggtcagtcatagtcttggatggtcggcaacaatttcggtaaatgccgttatcggcacacattttcttatgacaagagattttagtccggagtttattcgcaatgagctgtttttagtaatgattggaatcacaatcgcaattgtactgaatttgttctatgattatgaaggacagaaacaggatctgattcgttatatgagggagacagagaatcagctacagattcttttgtgtgaacttgcagcgtatcttcataataaagatatggagatcaatgtctgggatcggatcatcgcctttgaggggagaatgcatgaatttatcaaggcagcgtatgattaccaggataatacatttcattcgcatccgggatactatatagattactttgaaatgcgtctggcgcagctgcaggtacttcataacctgcattatgagatcaagaagatccgtaagatgccgaagcaggcacttgtgatcgcagattatatcatgtatatggcagattatgttgttgagatgaatattccggatcagcagatcgagaagttggaagagatttcggagcaaatgaagcaagaagaacttccaaagacgcgcgaagagttcgaaggacgagcacttctgtatcatattttgatggatctggaggaatttcttgtatataagaagcgatttgtgaatggattggatgagaagaagcttcgtatctactggaaacaggagatggagcaaaaagatagtgcaaacgagttgcagaaatgatgaaaagaaacggattaaagtcagaagaaacaaaagcaaagcattttctgattttaatccgtttttattaattataatatgttactgaaagaatcagatttttccagggaataatgtgccggcttttccgccttttataatatcataaaggacttccggacgctttccgtttgtaacaattgtgtttgttccttgggaagtggcaagggatgcggcctgaagttttgtacgcattccgcctgttccacgtcgggaacctgcgccaccggctaaagcatagacgctgtcatcaattgtatcaatctgatcgattagctgtgcatttggatacaatcttggatcgtgatcataaaatccatcaatgtcggagaaaatgacaagatgctttgcgcggcagagtactgcaacgacagctgagagcatgtcgttatcaccgaagagacgatcctcggattcgatttctttatagcttacggagtcattttcgtttacaatcgggattacacccatctcgagaagcgcattgaatgtattgatcagattttcctttttttcttcttcttcaatatcatctgcattgagcaggatctgggcaactgtcttgtcatagtcaccgaagaacttgtcatacagatacatcagactacactgtccaactgcagcagcagcctgtttcatacgcatactgtctggtttagcagtcatgttcagtttatttcttccgactgcgatcgctccggaggaaacgagtacaacttcatatcccatgttctggatatcagaaagtacacagacaagacggtctgttgtacgaagatcgctctttccggcgtcattggtaagtgtagatgttccaacttttactacgattcgattattataaagtcccataatacataactccttgctgaatatcttttaaaataatttccggatgtcagttaacaaccagccttgtctcatcgactgttttatagtatcatacagttatcaattacaaaagcgaatgtttctcatgaattacatgacaaaaacaaatataaagtaagtgaagagatttttcgtagcgaaaacagatgggaaaatgtaaagcgaaaggagtgttaaattcatggatggaagtattcagaaatacatggcatttgttaagacagtagagtgtggaagttttacaaaggcagcggaacagttgagttattcccagtcagggatcagccgaatgatcaatgatctggaaaaggaatggaaggtagttctgcttgaacgaagcaagtcaggagtaaagcttacaagcagtgggatgaagttacttccttatgcagaacgggtctgcagagaatacgagaaacttcaattggaagttgatgagcttcaagggttaaagtcaggattgatccgtatcggtacattttccagcgtagcaacacattggctgccgaatattatcaaggaatttcagaaaaattatccaaacattgattacgagatgcttttgggtgattatacggatattgaagaatggatcatggaagggcgaattgactgtggattcacaagattgccagtaagggatgagatggatacaattttcctggagcaggacaggctgcttgtcgtgcttccggaaggacatccgctgacagaacttcagaagattccggtcagtgcgctttgtgaggaaccgtttatgctattggagaaaggtgctaaggcagaagtttctgagatctttgaaagaagtaatttaaagccgaaagtacatttcacaacatgggatgactacgcgatcatggcgatggtcgagagcgggcttggaatcagtgttttgccggaactgatcttgaaacggattccgtatcgaattgttacacgagaactggaaatcccggcgtatcgtaatataggacttgccatgcgtaacagaaaaggtgcaactccggcggtgaagcggttcctggagtatctgcagtatagataatagagaaatgtgaaacttttatgaagtggcatgttctgaatgataatttgcttgatagaaggaaatatatgagagtataatgttactattatgataaaaagggcttattctatgaccgacattataagagtcatcagcaatcagagaagagcacaaagattgaaagaaggagaaaaagatgtcgattaaacatattttatttgatttagacggaacacttttaccgatggtacaggacgaatttgtccgtttttatatgccgcttcttgcaaaggtatatttgaagaaaggcgtggaaatggatccaaaaggattcattggtgcagtatggaaaggctatgaggcgatggtgaaaaatgatggttccagaacaaaccgggaggcattctggagttatatcgatgaattcctgccactttctgtggaagaatcagaggcaattgcggacgcattttacgaggatgaattcaatcaggccaagtgtacgacacagccgacaccactttcagatatggttataaaagaggcgaagaagaaaggcattgaagtttatcttgcaacgaacccgatctttccaagatgtgcaacaatgaatcgtatcgactgggcgggactggatccggaagattttaagattattacaacatatgaagatcatgtatattgtaagccaaatccggaatatttccgtcaaattttggaacagtttgagcttgatccgtcagagtgtctgatggttggaaatgacgtggaggaagatcttgcgatccgtgcgcttggagttcctgtatttcttatcacagatacgatggagaataagaaaaaccttccgatcgactccgaatatcagggctcgatggaagagttgctggaatttgtaaaagaactgccggaagtgtagaagttgcagcgccggtttattccgaacgattaaagaaatgtctgcaggatctttttgatttgatgttaagtgataacaaaaaagcgcgaaagtaggatgcaaaaggaacctattctgtggtagaatgtaagggacagccaattaactcacaggaacttctttaccaggaagcctatgcgaaagcagcagtgaacagtagtaatcaatcagttggaggcggctgtacaacagacagaaaataaggtgatagaatgatctataaattcggggaacgtctgacagagatcagtcaggaagaatgggagaaagaaaagtgtcctgctgtgttcctcacagattccaatcatgcggaggagacattggcaacagcagggatcatatatgaaagtgagatccagattgcaaagatcggattctgtaagattgagaatcagcaggaatgtatggtaggaactttctgtattccaaagcttcttgatgtattaggaagcagataccgaatgtacatgtttgtaaatgaagataatgttgttatcgtagatgacgagacattttcggaaagacttattaacagaatcaagagaaaacgaatgcatcagggcgagacgaaggaacgattcctttataattatattgcagagttcatgagtcgtgatctggagatccttgtggcttatgagcgcagacttcttcgtatggaagaggatgtgtcccaggatcatacagatacgatccagaaccgactgatgccaatccgaagggaacttctgaatctgagaagctattatgatgagatgatggacttgacaaaagagcttgaagagaacgagaatggattgtttttgaatgatcaattgaaatacttcggaacacttactgaccgtgcagaccgtctgatgagccgtacttctcatctgttggaatatgcccgtcaggtaaaggaggcttaccagtctcagattgacaatagacagaataacaacatgcagtttttaacagtgatttccacgattttcttcccactgacattgatcacgggatggtttggaatgaactttaaagatatgcctggacttgaaaatggatatccagcggtaatggcacttagtattgtcattatcgtgatctgtattttgatcttcaagaaaaagaagattatctaaaaaactgaaaaaactgtaaaaatagcgttgacaatcctcgattgaatgctataatgatggtcagaagaagttaaggattataaagcaacatagttcttagccgataacacgatgacgagacgagtaggatgtggaatgttacagagagagatacatttgctggaagtatcttagcaggaatcatttgaagactacctctgagtggccccaatccggtccggtgattccgttataatcatgaatgaagtggttttaaagcagtacatttactgtgatcttgaaaacaaaaagggtggaaccgcggatagtaaagtaattgataatcagactttatccgtcccttgcatgtgagtgcaggggacagatgaagtcttttctttttccgtagaatccccgaatgaaagcatgcatagttacttgaagaaaataggaggaagcgaaaatgattattacattaaaagatggatcaaaaaaagaatattcagaagcaaaatcagtaatcgacgttgcatttgacatcagtgaaggacttgcacgcgcagcctgtgcaggagaagtagacggagaggttgtagaccttcgtacagttcttgataaagactgtgaactgaacatccttacagcaagagatgagaaaggattggcagtacttcgtcacacagcatctcatgtaatggcagaagctgttcagacacttttcccagaggcaaaggttgcaatcggaccttctattgatacaggattttactatgatttcgaatgtcagtcattttcaagagatgaccttgacgctatcgagaaagagatgaagaagatcatcaagaagggcgctaagatcgaaagatttacaaaatcaagagaggatgcgatcgcatttttcaaagagaaaaatgagccatacaaggttgaactgatcgaggatcttccggaaggagaagagatttccttctattctcagggagactgggttgacttatgtgcaggcccacacctgatgagcacaaagggaatcaaagcattcaagctgttatcatcttcaggagcttactggagaggtgatgagaacaagcatatgctgacacgtatttacggtacagcttatgcaacaaaggatgagctgaaagagcatctgacacagttagaggaagcaaagaaacgtgatcataacaaacttggccgtgagatgaagcttttcacaacggtagatgtaatcggacagggacttccgctgatcatgccaaacggtgttattatcatgcaggaattgcagcgctggatcgaggatgaagaggaaaaacgtggatatatccgtacaaagacaccacttatggcaaagagcgatctttataagatttccggacattgggatcactataaagaaggaatgttcgttttaggagatgaggagaaagacaaagaagtatttgctcttcgtccgatgacatgtccattccagtattatgtatacaaagcagagcagcacagctaccgtgatctgccacttcgttatggtgagacatctacactgttccgtaacgaggattccggagagatgcatggtctgacacgtgttcgtcagttcacgatctctgagggacatttagtagtaagaccggatcagatggtaaaggagttcaaagattgtatcgcacttgcacagtactgtctgcaggttctcggagtagaagaggatgtaacatatcacctttctaaatgggatccgaaagatactaagaaatacatcggagcaccggaagtatgggaagagacagaaggtcatatccgtacaatgcttcaggaactcaacattccattcgtagaggatgtcggagaggctgctttctacggaccgaaagttgatatcaatgcgaagaacgtatatggtaaggaagacacaatgatcacaatccagtgggatgcacttcttgctgagcagtttgatatgtactatatcgatgaaaatggtgacaaacagcgtccgtacatcatccaccgtacatctatgggatgctacgagagaacactggcatggctgatcgagaaatatgcaggaatgttcccgacatggctgtgtccggagcaggttcgtgtaattccgatttctgataaatacaatgattatgcagcgaaagtggaagcacagcttaaagaagctaatatccgctgctcagtagatggacgttctgagaagatgggatacaagatccgtgaggctcgtctgaacagagttccatatatgctgatcgttggagcgaaggaagaggaagagcagaaagtatctgtaagaagcagatatcttggagatgaaggttctaaggatcttggagaattcatcgaagcaatcaaggatgagattgcaaagaaaacaatccgtaagattgaagtagaagagtaagaatagttacccgaaacaacaaaaatgcgaatctcccgaagaagttcaagtatgaaaatactgatttctacgggagattcttattttatgctatattgtaactgttcagagccaacctccaaaatgctacgcatttcgtcggtgtggcgtatccgccaaataaaatttcaaaaacagtcttaaaaatgcaagcattttacacctgttttatgaaattttgcttggctctgaacagttacatcatattataatatccggcataaataccatttttctcaagcagagtctcatgtgttccgcgctctgcgataccattttctgtaataacaataatctcgtctgcatttttgatcgtggacagacggtgtgcaatcgtgatagttgttctgttcttggatagttcttccagactgtgctggatccagcgttcactctcgttatcaagagcactggttgcttcatcaaggatcaggatcggtggattctttaagaagacacgggcaatcgagatacgctgtttctgaccaccggaaagtcttgcgccgcgctcgccgacgaatgtatcgtactgatcaggcagttccatgataaagtcgtggatgttcgcacattttgctgcttcgatgatttcttcttctgtcgcatccggcttgccataggcaatgttgtcgcggatggaaccggagaagaggtagacatcctgctgaacgacaccgatctggcttctaagactcttcaatgtaagagagcggatatcctgtccgtctacggtgacgcgtccgccagttacgtcgtagaagcgaggcaacagggaacagattgttgtctttccaccgccggatggaccgaccaatgcaactgacttcccagcaggaatttcgatcgatacgtgagagagaacagtcgtttcatcgtcgctgtaatggaaggagacatcttcgtagtagacacgacctttcacatctttgagttctactgcatccggtgcatctttaatctcaggttcagtttccataacatcaaggaaacgtcggaaaccggaaagtcctttctgcatcatttccatcagctctacaagaatctggatcgggctgatgaagattccgatataaagtgcgtacatcgcaagatcagcagctgacatttcattatttgcaatcagatagccgccatatacaagtgtgaccagatacatcattccctggaaaaacaggttcgagctcatgaattcgcccatacacctgtaattgtctttcttggagacaaggaatgcgtggttactcttctggaacttgttcttctcaatctcttcatttgtaaaagactggacaacacggattccggataatgtatcctgaaggcttgcgttgacatcaccgattttctttctgttttccataaaggtgcgctgcatcttctggttctgacggaaagagaagagaaacatcaggatcacaagtacgatcagcggaagagccaatttcttattaattaagaaaaggaaaataaaggatcctacgatcttaactaacgagataaataagttctccgggccgtggtgtgcaaattcggaaatgtcgaacaggtcactgaccagtttgctcatcatctgaccggaattgttctgactgtaataggaaaaggatagttcttcatagtgttcgaagagttcctggcgcatatccctctccatcttggctcccatgatatgtccctgacagctgacataatatttgcagaaactttggatgacatacatcataaagagtccgattgcaatccacggaagtgcctgcaggatgattgctttatcctgagtaaaaagtgtcttggtcgcacttcgcagaatctgcggatacgcaagatccacaagactgataatggctgcacagagaaggtcaataaaaaagaccgttttgtacgggccatagtagtggatgaatttttttagtgtattcataaacaaatcctcccagttttttcttatatacattagtttagcacaagtgaatattcttgacaagaaagtcggggtatgataaaaatgttattactgtttaacataatgtaaagaagtggaaaaagtcaggagaataatcaatgaatttatatcttgccccgctggaggggattacaggacatatttatagaaatgcactgcatcagtgctttgatggatttgataagtattttattccatttatcagtccgaatcagaaaggacatttcagcacaagagagaagaaggatgtgatgccggagcataatcagggaatgtatgccgtgccgcagatccttacaaataatgtggaagatttcttatgcacagcaaagaagcttggagattatggatataaggaagtgaatctgaatcttggatgtccgtctagaactgttgtgacgaagggaagaggagcgggatttttggatgagccacagaagttggatcgatttctggatgcggtttttgagaaatgtaatctggaaatctcaatcaaaacaagaatcggaatggaagatccggaggaattcgagacaatccttcctatctataataaatatccgctgaaggagctgatcattcatccgcgcgtgcagaaagagttctataagaacacacccaagcttgatacatatgcatgggcagtggaacatagtcaacatccgctttgttacaatggggatatctgtaccgtggaagatatggaacagttgaaaacaagatttccgcagacggatacggtgatgatgggacgcggtgtgctggctgatccggcactgggaagaaagctaaaaggcggaagtgccgcaacgatagaagaactaaagaaattccatgatcttctctatgcggcatattgtgaagaaatgtcaggagaccggacggttctttataagatgaaagaaatgtggttctatcttcacccaatctttacagatggaagaaagtatttcaagaagatcaagaaatgtgagaaatgtgtagtatatgaatctgtagtgaaggaattgtttttgagaagctacaaatgatttgaatgaggtgacaaaaagaaatggacgctattttacaattagatcagaacattctgctttttattcaagaatatatccgtcatgactggatggactggttctggaaagggatcacgcatcttggagattttggaatcttctggattcttctaacgattgttctactgattcctaagaagacaaggaaggccgggcttgcatcagcgttggcacttattataggaacactgatcacaaatgtggcgataaagaatgtggttgccagaataaggccgtatgaagtgatacaggaattagaacttatgattgagaaacagaaggatttttctttcccttccggtcatacatgtgcatcctttgcatcagcatttgcaatctacaagtgcaaggaagtgtttccgaagaaatggagaactgcggcaatggtattggctactttgatcgcattatcgagattatatgtaggggtacattatccgaccgacgttctcggaggattgatcgtcggactattctcgggctgggcaggatgtaagattgaagagctgatcatgaaaaagagagcagagaaaaagaaaactgctgataataagtgaaggacaggaatttaagaacctgtcagatagaaaaaggatttgattcatctgggttttgccagatacgatcaaatccttttttgagtccactttagagtgtgacttttaaaatttgctatttatttttctctttctgattctccagtgcagcttcaacgaatcccttgaacagtggatgcggtctgtttggtctggatttcagctccggatgcgcctgagttgcgataaaccatggatgagaaggaatctcaaccatctctacaatacggctgtccggtgaaagtccgcaaagggacattccattttcttcaagaacttcacggtagtcattgtttacttcatagcgatgacggtgacgctcttcgatctctttctttccatacagtttataagcaagagagttgtctttcagcacacaaggataagaaccaagtcttaaagtaccaccaatatcttcaataccaatctgatcggacatgatgtggatgaccggatgtgttgtatccggattgagctccatgctgtgtgcatctttgtaaccgatgacatttcttgcaaattcaacgatagacagctgcataccaaggcagagaccaaggaacggaacgttgtgtgtacgggcgtatttgatcgctgtgatttttccctctacaccgcggtggccaaatccacctggaacaaggataccgcttacgtcagagaagagttcttcagcattttcttctgttacagtttcggaatcgatccatttgatattcactgttgtgtgtgagtagattccgccgtgctttaatgcctctacaacactgatgtatgcgtcatgaagttggatatattttccaaccagtgcgacagtaacttcctgagttggatgacgaaggttttcaaccatatcagtccagtcagcaagatctggttccgggcagtcaagatgcagagattcacatacaacctgtgcaagatgctctttctccatggcaagtggtgcctcatagagatattctacatccaggttctgaagtacatgctcagccgggagattacagaacagagaaatcttgttcttcatcgcatcatccagtggatattcggaacggcagacaatgatatccggctggattcccattccctgaagttcttttacacttgcctgtgtcggttttgttttcatttcctgagatgctcttaaataaggaatcagagtaacatggatcagaataacattttctgctccgcgctcatgctgaaactgacggatggattcaaggaaaggctggctttcaatatcacctactgtaccgccgacctcgatgatagcaatctcagtatctgttgcagccggattacggtaaaaacggctcttgatctcatttgtaatatgagggattacctgaacagttcctccgccgaaatctccgcggcgttctttctgaagaacggaccagtagatctttcctgttgtaacattggaattctttgtcaggctttcatcgataaatctttcgtaatgaccaaggtcaaggtcagtttctgcaccgtcatccgtaacgaaaacctctccgtgctgtaccgggttcattgtacctgggtcgatattgatgtaaggatcgaatttctgcatagttacagtgtaaccacgcgctttcaaaagtcgtcccaaagatgcagctgtaattccttttccaagaccggatacaactccgcctgtaacaaatacatattttactgccatagtgtctttcctcctccgtgaatagttgttatcaaaaaaaatactttccaagtatacacctattcagaaaaaaattacaatacttttttgataaaaacatagaaaaaagatgggatgaagtgattttaacgaagcaatgtaaagaaggaaggcgaaaaagctttgtaaaatgggagcaatgcagaaaaaaacctctcagacagcaggtggttatacctgaaaccgcagagaggtttttgtgatatctttctgtattggtaaggatttgtctttagcttaaaatctgacgttcgttcacagcttcacttgtgagctgtacaccaagttttttaaatgtcttgatatcaacacttgaaagcattacggaagtatgagcctggcatcctttcagttttggaagctgggagagtgcaagctcagcgatcggattgacagcagcacttgcggaaagtgcaatcaggatctcgtctgtgtgaagacgaggattcttgctgttcaggtaatccactttcaatttctgaatcggttcaattgcttccggagagatgatatggacattgtggtcgatgccggcaagttccttcagtacgtttacaagaagggcagcgctcgcaccgagcaggttggaagtttttccggtaatgatgcgtccgtcttcaagttccagtgcggcggcaggtccacctgtttcctgagcacgctccagtgccttgacagcaacttttcggtcagaaacagtgattccttccatattcataagaagctcgatcttctcggcttccttctcagaagcatcacctttcagaagcgcattgagtgctgcatagtagcgtcggatgatctcctggcgggaagcttcacggcaggcttcatcatcacagatacaatttccggccatatttacccccatgtctgtaggtgatttgtatgggctggaaccatagatcttctcgaagattgtatttaaaacagggaagatctctacgtcacggttgtagtttacagttgttacaccataagcttcaagatgatatgggtcgatcatatttacatcgttaaggtcagctgtagcagcctcataagcgaggtttaccgggtgcttcagcggcagattccagatagggaatgtctcgaacttcgcatatccagcttcgattccgcgctggtgctcctgatataactgagacaggcagacagccatctttccacttccaggtcccggagctgttacaataacaagcggatgtgaagtctcgatataatcgttctttccgtaaccattctcactgacgatcagtggaatgttggacggatatcccggaatgttgtaatgaatgtatacagagattccaaggttctcaagacggttcttgaacagaagtgcactttcctgtccggagaactgtgtgattactacacttccaacgaaaagtccctgctcacggtaagtaccgatcaggcggatcacgtctgaatcataagtgataccaagatccccacgaatcttattcttttcaatgtcttttgcactgattgcaaagacgatctcagcctggtcgctgagctcctttaagagacgcagcttgctgtcaggttcaaatcccggaagtacacgggaagcatgatagtcatcaaaaagctttccaccgaattcaagatagagctttccaccgaattttccgatacgctcgcggatatgttcggactgcattttcagatatttgtcattatcaaatccaattttcatcgttttatcttccttactataaattttgccgaactgttattactattattaacagataaatctgttataaacaggcattacttttctagtatactatgaaacggcacgtttttacaatattttcataatctttttattgatttatggaaaaccactatttataatggtaggaagtagttgtttttttacaaataaggtaaaagatttgctggaaaataaccactatttaagttttggaggaaaaaaatggagaataacaataaaaacaaaggcccgaacaagaaccgacagggttggggaattattttgttcactaccttgttggttacttttgttgttatgggcctatattctatgatgcagggcggaagcgcttctgagatcagctatgataaatttctgaaattagttgataatggaaaagtagagtctgtcacatttaccaattcaaggatcaatatcgttttgacagatgacgccagaaaggaaaaggcagagggaaaacttacagaagtaaaggataataagaaagcttctgcagaccagagtgatagttcagattctactaagggaagcgaagatcaggaaaacgcaatgggcagtctgcttggccagatcagtcagatgcagggaagttctaagagcaaggatccggattattatacgggaaatgtatcagatgacacacttgtaaagcgtctggataaggcaggtgtagagtttaaagctcagatcccggatacggcaagttcactgatcatggatattttcatcacagtgatccttccaatcgtacttcttgtattcatgtttaatttccttatgaagaagatgtccaagggcggcggcatgatgggaatcggcaagagcaatgccaagatgtatatggagaagcagacaggtgtgacattcttagatgttgcaggtgaagatgaagcgaaggagtccttacaggaagttgttgatttcctgcataatcctggaaaatatacaggtatcggagcgaagcttccgaagggagcacttcttgtaggacctccgggaacaggtaagacacttcttgcgaaagcagttgcaggagaggcgaaggttccgttcttctccttgtcaggatctgcattcgtagagatgtatgtcggtgtaggtgcttcccgtgtgcgtgacctgttcaaacaggcacagcagatggctccatgtattgtatttatcgatgagatcgatgcaatcggtaagagccgtgacagcgcacttggcggtggcggtaatgacgagcgtgagcagacattaaaccagcttcttgcagagatggatggattcgatacgaataagggactacttgttcttgcagcaacaaaccgtccggaggtacttgatccggcgctgttgagaccgggacgtttcgatcgccgtatcatagtagataagccggatctgaaaggtcgtgtcgagattcttaaggttcatgcgaaggatgttaagatggatgagacagtcaatctggaagagatcgcgcttgcaacttcaggagcagttggatcagatcttgccaatatgatcaatgaggctgcaatcactgcagttaagcatggcagacaggttgtcagccagaaagacctctttgaggcagtggaagttgtacttgtaggtaaagagaagaaagaccgtatcatgagtgcagaagagcgaagaatcgtatcttaccatgaggttggacatgcgcttgtcacagcacttcagaagaatacagaaccggtacagaagatcacaatcgttcctagaacaatgggagcactcggttatgtaatgcagacaccggaggaagagaagttcttaaatacgaagaaagaacttgaagcaatgatcgttgttgcactcggtggacgtgcagcagaagagattgtatttgacactgttacgacaggtgcatcgaatgatatcgagcaggcaacgaagatcgccagagcgatgatcacacagtatggtatgtcagagcgctttggtctgatgggacttgaatctgttcagagccgttacttggacggtcgtgcagttcgtaactgtggagaagcgacagcagcggagatcgatgaagagatcatgaagatgctcaaagcttcctatgaagaagcaaaacgcctcttgagtgcgaacagagatgctcttgataagattgcagccttcctgatcgagaaagagacgatcacaggtaaggaattcatgaagatcttccgtgaagtgaagggaatccctgaaccggaagaagcagatggagaaaagaaagaagagcaggagtccggaagaatcctgatgaagccgacagagacacaagcagcagagccagaaacagtgaaagaaccggaaacacaggcaacagaaatacagccacaagaaacggtggaagaagaaaagtcagagtaagagctgattatcagtattaagagtttcgcagatgaataggaaaagtcatttgcgaaactctttttctttgatgaaaacatgttataatgaaatgaggcaaaatgtgtcagggtatatcagatgtgagatgactcccatctgatatagcctccggcaggattgcagagatgcgcagaagaagtatgtcatgcattgcatgacgcgcatctcgcagcaagaatgcagaggcattcttgaatgcaaggcacagaagatgcaaaacatcaatcaagacagtagcaaaaaaaacaggagacattgggatgacaaaagcagtattttttgatatagatgacaccatttatgattatattggagcacataataatacgatgccggtgatgaaagaatgggcatatgagaatttaggcatagcaaaagaagacttggagaaatatgttgccgaagcgagagtgaaggcagatgacagagccggaagagattatgcggtgaaccataatcgcctggtgagatttcagtgtatgctggagacacttggaaagccagttttcccatatgcgtatgagatgtataacctgtattgggatacattgatcaatcagattattccatctcctggaattgaagagttgatgaaagaattgaaacagcgaggcatttatatcggtataggatccaatatgacttcagatgtccagtatcggaagatattaaagcttggattaggtaagtatattgatggaattgtgacaagtgaagaggctggcgaggaaaaaccgcatcgaaaactttttgatctctgtgttgaaaaagcaggagtgatggtggaagaaagtatctttatcggagacagcatcgcacatgatgtgacaggagcacagaatataggaatgccggtgatcttgtatcggccgaaggaaaatgtgaatgagatcgagtggcttcagacagagaagggaaaatgtccggtcattgcacatttttctcagttttttgaagcagagaagatgttataagaaatgaaaaagatgtaaaagaaactttaataggaataaaaaggagacataagaaaaaacatgaaactggtcgaaaaagttccaaaggatctatataaaatatttggaagtaaatatatggaattctatatgcagtttctggtagcgctttatgaggagagcagtcagtcttattctcttctcgggcttacggaacgagagtgtcagatgatcatgaatgaacgactggcgaagatggcactggactggagtgaggcaagagtcgatgaggaaggagaactgatcaccagagccaacatggcatcagtcagtctgaagcattttgaagactggggatggcttagaagggattatgatgaaacgttgaatagttatgtcgtttcatttccggaatacagtcagctgtttgtagaattatttcagaaattatacagtgaaaatgatggtaaggaacgagagagtgtgcttacggtatacagtcatctctatacctacagtttagacaaagaaaagaataatgagattttaaaaagtgcgcttcatacatcaagagcacttctgcagatgctcgcgaacatgcaggagggaatgcgaggttatttcgatgaactgtcaaagcagagaagtttccgaggaatccaggaagtacttgtgaaagagatcaataacagtgatagcaaaaaatatgcgatattgactacaacagacagcttttatcgatacaaagaagctgtaaaagagttgatcgaagaaaatctggaaaagacagaagcaagaaaatactcatttgaaacagaactcttaagcgaagaggaaaatacgaggaaatcttatcgtctgcgaagaatgattgagatctgcgaagaggcaacagatatgctctataagatctcgcgagagtttgatgcgattgagcgaagatataataagctgattgaacaaaagacagtatttgcaagccgtgccgcagcaagaatccggtacattatgatggaaggtgtaatggaagaagatcagacagtcgcactgattaatctgatcaatgaaagtggcaagtcggaagagattctggataagttgtcttcaaaacttaggttttcggagccatataagattatgacagagaagagtctgtatcaaagacgtgaaaatcagaaggaaaagttcactccacaggcggtaacacctgagaaatcacaggaagagaatatgacagaatttgtcctggaaccactgtatacgcagaaagagatcagagatttccgaaagaaaaatgaacagaatggaaaattcacagtgacaaaagatactgtaaaatcaatagaagatttggagaagttatttatggtatggcagcatgcaacagaatctgcggacagtaaggcacagattgaagtggcgcaggagatggagaatgaggctggtttccgattttcaaaacttacgatagagggagtagaatcagatggttaattatatggaagaattgtcagtgacagaagctgataacctgaagaaaacaattgctgcattattcagacagacatgtattttacagatgaaatatgatcctgtaacacttgtcccaagagacaatctgcattatgagatctgtacaagacacagaaagtttattgaagactatctgtctgttttaagctgtgaattagtgcatgacccacaggaacacatttaccgtttacatggagatggaattgcgatagaaaagataaatgctaccgttacaaaagtaatcttactggttaaattaatttacagagataagattttaggagaaggcttgaaagctacagtgacgaatctggcggagattcgtgaatatggaaagaatacgaatctgattaattataagcttacgatgggtgagtggaaagaagctttatatgtgatgagtaagcatcagatcgttgaagtgccgggagcaatccagaatgttgaggatgagactccgatttatatctacagcacgatcaatctatattgtggaagtatggatattactgcgttgatcaaagaatatcaggaagatcagtacgcagaggaagagattacagaagaagtttctgaacaggaaatccaggaagaagcagagggaggtgtggaagatgaaagagaaacagtcgaagaaaatatttactagaatgttaatgaataactggggcggtatcagtcacaaagtgatggagtttcatgagtatgtgaaccttttcagtggaaaaagtggatccggtaaatctactgttatggatgcaatccaggttgttttatatggaagtatatcttccacattcttgaataaagcggcggatgacgcgaagaacaggcgtagtgttctaagttatcttagaggagcgcagaaagacggttcctttaaccgagaagaccaggacttctgttctcagatcgtcttggagattaaggatacaggaaagaatacacatacttgtattggtgtttcatttgaggttggaaaggcagatacagatattagaaaatattgtttcttcagtcattccggaaagataccggaggatgaatatttgacagaagaaggtgtcccgtatacaatcgcgaaacttaaaaaattggtagaagcaaggatagaatctgctgacaacagaggtcgcggagatgtgaaccgtgtatatccatcaaaagaagcgtatttgaaaacggtttatgatgcaatctttggttatgtagagccgggccgtatgatgacaatggagaaaagcgcgattgcacttcgtatgacgaacggaacgggacagtttatcaaagattatatgtttccaaagagcaaggaagacacagttgcaacaatcagtgatcagcttggcgcttaccgtgagatcaaggaacgcgtagaagatctggagcagagaattaaaatgcttgacgagattagtcagcataatctagccttgcagaaagcaagagctgataagatctatgtagaacggatactgaaatatattgaaattgaaaattgtaaggcacatttgcaatcgaaagaggatgatctgcaggatattctcaagaagattgaggaaaaagaagaaaagagaaaatcttatttggcagagaaagacacttatacaaaagagcaggtggaagttgaagcagaactcaaagccagtgattatggtcagaaggagaaggagttaaaggagattgagaataccattcagcttctggcgacgaattcagaacaatggagagatattgtaaaaggtctttcagcctgggaggaagacgatgaagtcagtgcttatgtgagcaatcaggcgctgcatagaattgatgatatccgagagggtgttgtgagtgaagattcgattgaaaagctaaagcaatatttaagtgatgcactcgacaacatcaatacagaattaggcgatgttcgcgaaagaattcgtgagaatcagaaagaacttcaagagaagcgggagatggtagaagacctcaaaaatgacagaaaaccatatcgtgcggaattgaagcgtgcaagacaggaattacagaatatacttagtactcagtatggaagaacgatccatgtaaatatctttgcggacttgtttgatatcacggatgaagagtggaaaaatgcaatcgaaggccgtatgggacgcgtgaagcatagtcttgtgacagcgccggagtatacgttggatgctgcgaaagcatttcgcaaaatgaagcaggtgaaggggatcgaggatgtcgaactcatggatactgcggcaatcgtgagagacaagccgaaggcagacgagaatacactgtacgagtgtgtgcgcgcagaggaagcttatgtagattcttgtctgaagcgatacttaggccgcattaagaaatgtgagacggtggaagaacttcatgagacgagagatggtgtcacaaaggactgttattcctacagcaattacattttcagacatttgagaaagaatgattatgagaaatatgcctgcatcggaacgaaagtgtcaaaggcgaagcttcttgagctggaagaagaggctgcgaagctgaaaaaagaagtggaagaggacggacgcgttgagatagcactgcgtgcagcacagaaattcgagtgtctgaaccagagcacagaacagattatgcatctttcaaaagcagcagaacagttgcagggttattatgaaaaacaggaaaagttacgtctggaagtagaagaactgaaaagaggagaccggacagtcgagctgaagaagaaaaagcaggaattactggagttgcttaagaaaaatgcagagattcttgatagcattcaaagtgaagtagtacagtatgcgaagacacagggacaaatcgagagtaatatcaaatcattttcagaaaagataaacttcctgacagagggatttgttgtcaacgaacagcttcagaatgaagtaacagatgcgttaaaagtacagagcgaagcagcttataagagagacaagacaaaagaaaaggatgctttggaaacgttggaagagacggagagagaagaactgcaaagaagtagaaataagttcaataatgcttatccggcctatggttttacaggaatagaacatgaaaataatgtgtatgacaaagtgctgaatcagtgtaggaaagattttgaaccgaagtacaaggaagaattcgataagcagtataatctggtttactatacattgcgtgaaaatgtgattgcttccattcatggtgaaatcaaggcagcttacagacataaaaaagagatcaaccgtctgcttgcgaagatcaagttctcagatagtatttaccagattgatatcataccggctcagaatgaaaacggacagttctatgagatgcttacagcacctgaactagacagtaaagtgttcgatgactacggatttgaaggtcagttaagtcttggtgaggatgagttctatcagaagtatgaagaagatatcaagcgtctgactgagaagttcatgcctccgaaggaggaagatgcaagatccttaagccagtatcgtcagcagatggagcagtatgtagattaccgtaattatctgactttcagtatgtatgaaaaggtggaagatgagaatggaaatatccgcaaaaatgcagtcgatgatatggcaggccgtgactccggaggagagggacagaacccgaaatatgttgcactgcttgcaggctttgcgatgctctatatgcagcagacaaaccgtgattctaagatccgtctggtgcttcttgatgaagcattttccaagatggataaggagcgaagtgaagtatgtcttcattatgcgagagagctggagcttcagctgatcgtatgtgtaccggatgaacgtctacagtcgctgatacgaaatgtagattgtgtctatggattccgaagacatcagaatcaggtgtctatgatgcacattgataaaggtgattacctcgatatggttgagggaaatgaataaggaaacggttatcagaatcaagtatctgtgatgcatattgataaaggtgattaccttgatatggttgaggaagacgagagatagaagaaaggggcttatcgcctagtgcgatagctcctttctgtataaagataagcaggcggttccgttgcgggatcgcctgctttttaagaacaaaaagtgttttgaaatgaaaacatataatagaaaaattggaggtgatatttaactcacttcttgtaaatttactgtaaaaagaattttttttatgaaagatgcacaatgttacctgataaatattgatgaatggttcaattatctgtatatttttattaagagaaaaattatgtttgtcaaaatactgcacaaaagagctgattttatacaagtaaggacagaaggaggagctttatgacagagaaaaaatcaatatcacatttttttaagccgggaatagttcttgtgcggggaatatggatgcttttgggtattcaaaccactgtatatgcagaagaatccggagatgatggagcagtcgtggctctggatggaacagaacaaaaacagaccaaatgatacacgtaagccggcggcatatattgtaaaagcagcgttggacccggaaaagctggttgcaggttcatctgtgtggtgtttttccgacatttttgaggaattttacggaggatttggactgctgacacacagtgggatatcgaaacctgcctattatgctatgaaaatgctggcagaattgtgtgataacagaattgttctggataaagacgcttccgatggcgaggtgggtatagcagcatttgaggatgtggacaagatgcagattctattgttccgtcaaaagatgaaaaatgaggttttaccgaaagaacatattgaggttgaggttgcacttgagcgaaatcccaaagaggtatttctggaacgcattgatgaggaacattgtaatccgcttcagctatgggaagaaatgggaagtccccaagaactgacaaacaaacagaaagagatgctgcttggagagacagcgctcaaaatggagagagtatcgtatgaatacacggaacatcgtcttactttgaaagcagaaatgggtgtaaatgatgtatggatttacgctctgtttttgattattttatattttttcgataggcagaagggggacatccaaagcgttgtttaaaaagcttgctaaaatgcgaggcagcggtaaatccacacagatatccaatgttctctaaagtcaggtctgtttcgttaagatattgggcggctttgtcaagacggatattcataagcagagaattaaaggttttccctgttttttcttttacgattctgcatacgtactgtttactaaagtgaattgtgtctgctgtggatgccagatctgctgtctggtaattttgtgttagataattgagtatttcttgatactttatatcgcttcggctgaccttaactgatgatttgatttttacactttgatcacgcagtatagtagcaaataacagagaaagataattcttcatcactgtattgcaatatttatcctgattaatatattcggcaaatagagccagaaaaagatcccgaatattatcgtggttggaggtatgtatggcgagataagaggtataatcatcggagtctaatgttgtctgtgatataaaagtagtcagagtggtgtctcctagaaaaatgttcgtgtattctgatataacaaaagaacggcgaagatttaggaagagacagagactctccacgtcgacggaaatcgcataatatacctcaggaggtataatgtaaaagtctcccgcccggaggtgaaacaattctgtatcaaattctaaagtacctttgccttccatgagatatataactgcataatagttgcatttatgccgtaatgaattgggaaagttaaattgttttgctacagtaaagtcacatccggacagaatattgaagtaatctgttatttcttccagttccgtaatatattttggcattgttatattgctatccatgggagatggaaaataaaatcgggaaagattttggcttttgatgatatagttgtcgaaaaattcaagataagtatcatattttaaaaagtttttctgtgatctggaatattccataaaagaaatttcaagattattcagattctgcagtatatgatatacctgtgttccgtctatgagcttcattcagataaccctccatccatattatttatagtataacctgtcgaaaaataaataacaagatgtttcatgagagataaattaatccttcaatattaacaggtttacagagaaagtgtaggacagtgattctctcaaaccagaggaggatataaaatatttgtaaatgaaggaggttcaggaaatgagtgtacagatgaaaagattaaacattgccgatgaaaaattttccggcaaaaaggcatttggtttctcacttgtaagactgggcaatattcttgcaggtctcatgattggagaagtaacttactttgcgacaaacagtctggcgttgactgctgcggcgatttctacgggtgttgcgatcaagacggcgattgatgcggtaacagatttgattatggggacgattgttgaccggacgcatacgaaatatggaaaagccagaccatacgtgctggcgggaatcctgatgtggattaccctaatcgcatgttttgcggttccaacaagctggtttgcaggaatggcaccggagcggagaaacctttggatggttgtgtacataacagtgtttaatgcattacatagtgcgatattttccacaattgtaaacattgcttatgagacacatattaagcgatctattgttaaggaagaaaaccggattaaatctttgacagtgataggaatcatttatgctgtcggatctttggtactacagatggcgcttcccgcaatcattaacattttccatggatcccagaccgggtttgtgctaatggcagtggtaacagcaattttcggtattatcgcgtgtatagtctgcttttttctctgtccggaatatacagaggaagagctggctgcatttggaggatacgatgtagaggaggcaaacaaaaagattccgatcagcgagtttttaaaagatgttctgaagaataaatacctagtgatgtatacttgtatcaattttttatacatggttattctgatgagttcttttacaacaggacagtattattttcagtatgtatttggcaaccttgggacgttttctattgttatggtaatgtcggcaattttgcttccgttgtatttctttattccaaagatctgtaaacgttttggtgtagcagcagtgatccggacaacgatgatcattgcagtaattggagttttgatacgtgttgttgcgccgagtttattgccgacacagtgtatcggatatttgtgcgtaagtcttccgaatatttttgtggcatgtgttggttcccagattaatttcgagtgcatggagtatggccgttataagacgggagttattgctgaaggtatgtattcggcatttgtaagttttgcacagaaaatggcgaccagtttgagcagccttattatcggagtgatcctgtcggttagtggatttgactatttgaccgctgctgttgtcaataatggttttacggattggtcagaactttcagctttaggaactgaaggatatgaaaaatatgtagagggaggaacacatacagtagaagcggcaatgtcgggaatcaattttgcttataactggatgccattgattttccttgtaatctgcataattctgttttgtttcttccaccttgaaagagatttgaaagaactgcgtgtcgcaaatggtctgaatgaggacggaagtatgaaaaaataaatagtatattagtaatgatatgaaccggttaaaagcgtcgagggtatttccgcggcgctttgaatttaaatatagggtatggaaaggaagaaaattatgaaaattataagctttaatcaaaaatggatttttaaaaatgaattaaaaaatattccggaacagacagttgatctgccccatgatgcaatgcttacagaaaagcgccttccggaaggtaaagccggcgctgcaggagcttatttccccggcggaaaatacagctatcgaaaagacctgttcggggcagaagagtacagggacaaatcagtttatctagaatttgagggcgtttatatgaaatcatcggtatatcttaacggagaaaaaataggtggtcatatctatggatatacaggattttatgttgatctgacagacaagctccgcattggtagtaataatgaaatcagagttgtagcagataatacacagatacccaatactcgttggtattccggaagtggcatttatcgcaatgtaaatctgattacgggtgataaacggcatattaagttagaaggaatcaaggttgttacagaaagtatagatcctgcagtgatttctgtgcaaacagaggtggaaaacgatgaggggctggacataaaagttgaagtctatgagtataagaaaggatttgatacaacaggtaaagtaaaaaggcttgaagcagaagaaataccaatatgtacagggaaaggaaggaactgtcatattgagattccggatgccagtttatgggatgatgagcatccgaatctgtatcagattcgtgtgctcctgattgatgataagaatcagattgtagatgagcagtctgtaattacaggtatcagaaagcttttgtggagtgcagaaaatgggattcagatcaatggcaggatggtgaaactacggggcggatgcattcatcatgataatggaattctaggtgcgtgtgctccatatgctgccgaactcagaaaagcccaaattttgaagagagcgggatttaatgcgattcgttccgctcacaatccaataagcaaagcaatgctggctgcctgtgatatgctgggtttatatatcatggatgaaacatttgaccagtggaagtgctctaaacttgattatgattatgcgctctattttgaacaagaatgggaaaaagattgtcatgccatgatattaaaggatcgtaatcacccgtcagtaatcatgtactcaatcggaaatgaaatcggagatactggtaaacctgaaggggcgcagatcagcagaatgctgtcagaatattttcgaactcttgactcaacgcgtccgacgacaaatggaattaatcctgtagtttcaactataggaggaattccgggttcgaaaaaagtatcagcaaacgataaggttgatccctatgaagaacaacaaaattctcaggcaaaggccagtcttcttgctaatatgatagtgacaattgcgccggctgtagcaaaaataataggtacaccgcgaaaaactgaaaagcttctaaaaccgtgttttgatgagatagatattgtcggatataattatgcggaggaatgttatgtaccgcaccataaagttgctccagataggattatggtgggtacagaaacataccctcagaaattggctgaacgctggtcgggaatcatggaaaaaaactatgtggtcggtgattttatgtggacagctatagattatcttggcgaagcaggagtgggagtacctttatacggaacaaagcatggcggctttaacagaccgtatccatgtatcagcagcggatgtggggttatcgatctgttgggacatattgatacagaagctgttcatgcagcgattgcatggggaaagtacgacaagccatatattgctgtacgaccggtaaaccattccggagaaaaatatttcttggggatgtggagaggtacagatgcaactgccagttggacatttcccggatgtgagggcagaaaagcggagatagaagtatattctccaggaacatatgttgaacttttccaagatggagagtctcttggaaaaaagagactggagtatgcaaaagcaaaatatacgattacatacaaaaaaggaacgttaatagcggtaagctatgatgaagctggaaataaaactgattcctgtacgttggtgtcagccagtgataacacgaaattgacacttagaccggataaaacagagatgaaggcggacaatgaagatatggtttttgtggatgtaagtctgactgataatatgggaattgtaaaaaatctggaggatcaaaacgttacagtgcaggtgacaggtgctgcaaaacttgcaggtatcggaagcgccaaccctataacggaggagtcttatctgggagatactgtctctacatggaacggacggatgggaatttggattcgaagtaatgggcataagggaatagcttatatacaagtaaaaacagatactttggaagatactttgaaaataaaagtattttgacacaggaaggtaaaaaaatggaaataaagtatctttatcaggatgaaaaacagacaccagaaaacagagcccaagatttgattgccagaatgaatcttgaagaaaaaattaatcaattaagcggtgaaattgttatgaatcagataccggagggaacacttggacatggtattggagagttggttgtatatgcttcaaagggttcgatggaggaaaccgctgaatttataaatacgatccagaaaaagattataaataattctcgttgggggattccggttatcgtacatgcagaggcattatgcggaggggttgttgcaggaatgacacaatatccatctccaatcggactcggagcatcttttatgcctgaacttgtagaaaaaatggcggaaaatataaagaatgagatgagaaatgttggaatccgtcaggtgctttctccggttttggatttggcgcgtgattttcgttggggcagaacgaatgaaacatatagaaatgatcccacacttgtatctgcatttggatgtgctcatgtgcaaggtatgcagaccaatgatttaagaaaaggagtaattgcaacgtgtaaacattttttggggtattcgtcacctgaaggaggaattaatacagcaaggactcaaacagataacagggatttgagagagaattttgcaaagccgtttgaagccgctattcgtaaagcaggtttaaaaagcataatgaattcatattccgaatatgatggagaaacgatatgtgcttcaaagcatatattgacggatttgctgcgtgatgatctgggatttgatggcgcagttgtcagtgattattcctcactgatacggattaaagataattcacgaatggcagaagattatcaacaggctggtatattagcactgaaagcgggaattgatgtggaattgccgaaggctgtctgttatggttccaatcttctgcaagcggtcaaagaaggtaaaatagaagaaaagtatgtgaatactgcagttaaaagagttctgaaattgaaatttgaattgggattatttgaaaaaccatattgtgaatataaggaacttgattgcttaaagtgctatcaattatcagagaaaatgaccgaaaagagtataactctgactaaaaatgacgggattcttccgttaaccgacaggaaaataaaagtagctgttattggtcctacaggagataatttgagaatgttaagcggctgttattcggtagcaggttctatagatatgattttcagtggtatgtcacaagaaggtgtggataatgaaactgcggttacagtacctgataaatataagagaatgagtcctgaaatatctgcaaagattgataggattatccgtcagatttatccaatgtcaaaaactatatatgaagcaatcaaagaatattatccggaaactgaatatgtagaaggctgcgatattggtgataacatatattatgataaggaaaaggctgttgctgctgcaaaaaaagcagatatcgttattctgacactcggagggaaaaatggctggggatcaaattgtacagatggagaggggctggataatacgtcaattggtttacctggccgacaggagaaattgatgcgtgaagtctataatgtaaacaggaatgtaataataatccatacggataataagccgttggtcaatacttttgcatatgatcatatcccggctattattgaagggtggcttccgggaatttatggtggagaagtattagctaaatgtgtagcgggaataattaatccaggaggaaaattatcagtagatattccgaggagtacaggacaaactcccgtatattattatcaacaaaacggaagccgtagtgacagcccgatgtatggactgaataaacacggttacctaaatgaatcttgttgttcagtacgtccgtttggatatggaaaatcatatacgagttttacatataagtgtcagaatatgaatgtagatgaagaattgggacttcctttgttgacttttgaggtagaagtgtcgaatataggcgagatggaaggtgacgagacaatacaattatatggaattgatgagtatgcttctattatccggcctcaaaaaatcctgcttggatttaaaagagtaacgctttgtccgggcgagacgaaaaaaataattatatcttttaggcttgaccagatggcgtttccagataaatgcggaaactggatacttgaaaggggacgctttatttttgaaataggttatagtagcagagatataatcgatacctacgaatataccttagagtcttcaatagatattgatcatacaaaacgtccgttttttgcagaagcatatgtaatatagacagttaggtatatgaagaggggaaaaggagaactgaatgttacgcgcaattaatttaaagactgaatatttatataacccaatggggttggatattgaaaaaccacggctgttctggaatgcagatggtaagggcatgcagaaagcatatgaaatagaatatctgttaaacgatactttgcctgtccgtcttccaataatgaaaagtggcagtatgaggacagtatttacacctgagctcaaaagtagggatagagtttgctggagaatccggcttacagatgaaaatagagaaactggtgaatggagtgaatgggcatcatttgaaattggacttttaaatgttgaagactggaaagcaaagtggatcatgggcgattatgaacatagcagcaagccggagatacgatatcctgtagattgctttaaaaaagagtttactgtgaaaagtgctttaaagaggggcagattgtatattacagcatgtggtttatatgaagttaaaataaacggacataaagtaggcaatcgggtatttacaccaggttccaccgcttttcagaagagagtgcattatcagacctatgatgttactgagatgattcaaagtgaaaacacatttacgattgaacttgcagatggtttttattcaagcaagacgggatgcttcaataaggcaaaagtcttcggatacgagcctaagataattgcccagcttgagcttgttaatgaaaaagacgatatagaaatagttggtacggatagaagttttttgtggtcaaacgatagtgaaatacggtatgctgatatgaaagacggagaaactgtagattctcgtatgagtgcaacttatactggaacagcccgggtgacggaatatcaggggataatctgcgcagataataatgtaccggtgatagaaaaagagcagttgataaatccaagagtggttcattgtcctgatgggaatacggtactggattttggacaaaatattgctggatatgtagaatttacagttactggtgcacctggacataaagtatctttgatatgtggagaaaaattggatgataatggtaatttcacgataaaaaatattttgcttagcggtgattatgatactcaacgaatgcagcgggaagaatttatttgtgacggctcgacccagacatatcatcccaaattttcggtaatgggatttcaatatgtaatgctcctggactggccagagaaaataaaaccggaaaatttccgggcaattgctgtatatagcgatatgcgtgttacagggaaatttcaatgttctgattctgggatatgtcgtattttgcaaaatactatgtggagtgtaaaaggaaattttcttgacgttccaacagattgtccaacaagagagagggctggttggaccggagatgcccaactattttttaatacaggaaattatctgatggatcaggcggccttcttcaggaaatggatgagggatatggcagattgtcagaaaaataacggtatgatttataatattaatccatcgaatcctggagctggggcatttatggaatggttatctgtggaaggcggagttggctggggcgatgcctttttgatgattccatatttttactggaaaagatatggagatgatatgctgattcgactatattgggatcagatggtaaaatgctttggattttataaaaaacgaattggaaaaagaaatctttttacattgtttaaaccgggatacggtaagtattccaagtatctgtgcacatgtggaagagattttggtgagtggacggaaccagacgactgtgcacctggtaaaacatcacttttatttccgcatacagaggaaggtacagcttatattgcgtttgatgcagggattatggcggagatggcggagcatctgggatacaatgatgctgagatgtacagaaaactccatgaaaatgtgaaacaagcgtatcggcattatttccttggggatggtacattttctacagatagaatgtgcaaatatgtacgtccctgcgcgttaggacttgcggaaggagaagtaagaaaaaatctgctaaagaatattgtgcggttaaacagagaaagaaattatcggattggcacaggatttctctccacaccttttgtgctcggactcctcaccgaagcagggactccacaagatgcctaccatatgcttacaaaccctgagtttggctggatgcagcagattaaaaaaggggcgacaaccgtctgggaaaattggacagatgatgcatcattgaatcattattctaaaggagcatgttgtcaatggctgtttgactgtgtctgtggcatcagactggatgaaagggagaatcattttattattgagcctcatccggtatttcaattggaaaatgcaggttttgtttatgaatctgtctacggaatcgttgaaagtgagtggaaaaagcaaggggatgactatgtatatcatatagtaattccctgtaattgcatggctgaagtaaaactgccgggagaaaaagccagaaaattgcccgcaggaagctatgaatttgtacagccgataaaaaagtagaagataatgtatagaatgaaagtggtgattgaaatagatttaatttcagaacaggctagcttctaccatatatagaacgattgttttggtggaagtgttttgtggtgtgcatttccctctaacagagttttgctgggagggattttttatgaactggagtattttacacagtgggctgctgatcaaaagcgccgattactaagtttatggaaagactaaagaaaagttttatctttccctatggatcagtcgagatgaaaacagaacatttcttgtctttcgtattgatttgccaagaagtaatatatatcctatattattcacggctatgccgtgtgaagtggctgaaagccacatgattactgtattttaattgaatattgctgtttcacctatcaagtgaataaaaaaagagcatccatttgtggtaaaattaaggtgtcgaatcttaaataataacccaaaggagccctttatgagtattgtaaacaccttatcactagaaagcaatagacagattaaaataaattttgatggaggagatttatcctccgatgcaggcttacttcttatcaaagaattcgtaagcaaacttggccttgataaacttttcagtcactcatttaagaccaatgattctgcatcatttagatatcacactgacaaggagaatctccttcagatgatatatatgatcattgcaggttactttgaagatgatgcttcagatgaacttacaaatgatccagtatttaaagcagtgctaaataaagatgctttagcttcacaacctacggtatcaagattctttaatcgtatggatgaagatactttaaaccaattccttacaattggcagaatacttcgaaaaagagtttacagtgttcagatgccacaggctgtcattttggatttggattccactcttcttgatgcatacggtaaacaggaaggcagagcctttaacgttcattatcaaagcaatggataccatccgcttgtctgttatgatggattgaccggggatttgataaaaatccaacttcgtgatggaacacagtattcctgcactggagtggttgatttcttgcaaccaatacttgatgaatatctgaatgattatccgtcaatccgaattctgcttcgtggtgatagcggttttgctacacctggcctttacaagcagtgcgaggaaaatggcacaaactatgtaatccggctgaaggagaatggtattctccgtggaaaagcatcccatcttgtggatgagcttgatgaaatcactagaaataacaaagtcgattatgcagtagtttatggtgaattcatgtacaaagctggtccatggccttatggaagacgtgtagtatgcaaggttgaaaagccggaaaaccagatggtttacatgtacacattcattgtcacaaacatggattcatcaccagagtatcttatcaaattttactgtaagcgaggactgatggaaaactttatcaaagagagtaaatctggttttgattttgcttccgtaagcagtcatacccgaattgtaaatgccaacagacttcaagtacacgctcttgcgtataacatatttaattggtttagacgattggcgttatcagcaaatatgcgaaagcaacgtattgataccgtccgtttaaaactgctgaagattgctgtaaaagtagttcgttcagcaagatatatcacattcaagctttgcagtagttgcccttataagagtgaattctataagacaatttttaatatcggcaagctaaatgtacagctggaatagcacctattaacgaaccttgacagtttaacaattgctctgaactctgcgatagagactttgcgcccttttgacaggaaaattgagcgatgttatgactgcatggagcatttttaatttcatggtacagttatcagttcagatattgttccatgaataattcaggtatatgaattaaaaagaaacatatcttttttttcggctggcaaagccggagacgggatatgtttttttagttgcacaggaaagaagagcctgtcagaaatgcagaagtccaccgggcggtatggaacttattgaatttcagatcgaacggaggataaatgaatggatgagagacgtccaaaaagaagaagagataaagataacccatatacactgagctgtcgggacggtagatactacataacatttaaggacgggcagtcggtgaatcagtgaagaattgtttcagatatttgatctataaaatgtcaagtaaaaacatcatttcccgtgcatctgtacgagataacggaatctgtgaggtgggccaatgtggtcaacctaatgtcaacttaagacaagtgtctgcttaggttaatgaataacggtgctaaatcgagaaaagaggaaggtagatttgaaaagaagacgaagagttgaccacattagtgtcaggcactataaacacgcttctgaggaagaactggaatatatgtctctggaaaaacaagtgacagaatatatgccaccatgtttcttgtggcagacggcgacagatgaactggttccggttcagaaatcatttttatttgcacaggcattacaggagaaaaagattccgtatgcgttccatgtattttcaaaagggaaacatggattatcacttgctgatgagtggataaggactacgctttaaaatggcgagatgtataactggacacacatagtgtgaacagcaaccgctaagtgtcacatgttacaattctccagcatccttacttggcagaaaacaggattcatgctatcattaaaaacaacgatagcatgaatcctgttttagttgaaaggggatgcaaatgacagaattaagaaagcttccgattgaaattgaagattttgaagagattcgacaggaagatttttattatgtagataagacaagattgattgaacagttacttatacaatgggcagaagtaaatgtttttacacgtccaagacgttttggaaaatctctgaatatgagtatgtttcagcaattctttccgggagttcaaaacttgatgagacagatcaggaattattaaagcaactgaagaaaaaagaaatgtcaaatgattcattggtatatagtatcagggaactcacagaattattggagaagcattatgagaaatgtccgtatccagacaattggatcataagaaaacatgcccgtgtccgggcaaaagaatcgcggggcacgcgaggagagcttgtagatacttggctcagtagagccattgagcaagaagcccccacttcaaaatcagtgatttaagtggtgggagcatgttaccgggctgtctcagggttgcaaaagaaagtattttcacagattatatgaagaaaaccatcagtatcagagatacttttgtgaaaaaaccaacgaaagagaacttctatcatggattacttcttggaattctcggatttaaagaaaactggtctgtgatgtcgaatagggaatcaggagatggattcagtgatattttgattcgtatcgaggatgaggatgttggaattgttatagaggtgaaatatgcatctggcggaaacatggaaaaagaatgtgaaaatgcactccagcagatcacagatgtcagatatacagaatctttggaacaggaaggaatccataagattataaaatatggaattgcatgttataaaaagaaatgtaaggttatgatgaagatcgaaggatagaggttcaatatgaatgatcaatttatacacggagtaatattcgattgggatagaattgataatgacagctatttaaagaggattgaggcttttaaaggtgttgagaaacttgattttaataaagcgataactttttttgtgggagaaaatggcagtggtaaatcgacattgttggaggcacttgctgtggcacatggtttcaatccggagggtggaacaaagaattatattttttctactcatgatacacattcagaactatgtgatgcaataagaatttcaaaaggttatcgtaaggaaaagtggggatattttcttagagctgaaagtttttataatgttgcaacgcaggaagaagaatatgcagatttaaagcacccttccgctaaatatcatgaaaagtcacatggagaaagttttcttgcattagcacagaataatttgcattcaaatggcttgtatctttttgacgaaccagaagctgcattatcaccccaaagacagcttacattgttaatgcaaatatatcgatttgcaaaagaaggagcacagttttttatagttacccattcgcctattctattaggtataccagatgcagacatctattgttttgacaatgggcgaattcatttatgcgaatatgaagaaacagagagttatcaaataacggaaatgttcataaacaataggcagatgttgcttgatagactgctcgcagattagtgctgatgaaaaatcgaaggataaaatatggaattgaatgaaaagaatctgccgttggcaaaatggctgatcgataagacgaatacaaaggactatcgcataggaaatctctcaggaatgaaacatccaaaggtggatgggaatcttttgaaaacagtaggtggcagagatgaactggtcagacaggcaaaagttttggaaagaattccagcattaggcggagaagaatatctgcattttgactggagagaaatgaatacagatattacgaggattgattatagggtagaagtggttccaagattatgtgagctgatcggaatcatggatccaagagaacgccagttacaggcaatttcaagaatatgtaaactgcaggtggatgtatccgaaagctgtctaagcgcttattgtgatcatgcgttagaacagctgaataaaggaaatacgaaagagttatccaaagcggaggatgaagaatttcttaaatgcctgaaagctttagctgatctgaaagaaccggaatggaagcgtgtgttcagctctaaagtatttgaaaagaaaaatgatatcacaccatctaaagttttcgaacgcatttatcaaggtgcagttattgaagctttgaaatactctccgcaatatgaagagggcatgtcagatgatgagatactggcagtacatggaatattgagttattctcagacattggaatggaaaggtgctgtggagtattgcctgacagatcgaaatggcacagcgagtgaggagaaaattgacacttcttcgaattattatggaacagtgcttaatgcacagacattagagcatgccattccaactttacaaaaaggtgttgaaaaaatcattgtgattgagaataaagcgaattacgaaagtatggaatatgattcaaaagttttgtatctcttttgtcatggctacttttcgccaaaagaagttcgctttttgcaaatgttaatgaagacagcaccggaagaaatccagtgttatcactggggagatatggattacggtggaatacagatctttttatacaatgagaaaaatattttcccaaatctgactccatggaagatggatgttctttcttatgaggatgctttgaaaaatggaaaaggcattaaactaaacagtgagaagaagaaaaaattagaggcattaaatgctggacaattggaagcgttgaagcaatgtatcctggaaagtgaaatggagattgaacaggagatgttaataggataacttgagaaactcgcagagcgtgtttctcatagttctattttattttcagttctccaatttcttggtgacatcccatagacatttttgaatgcacgtgaaaaatgcaactgattcggataccctacggcattcccaatatctgcaattgacagtgaagtgatcttcaaaagctctgcagccttagtcatacgataactgatcaggaattcctgtggagaacgtccaatcgtatcgtgaaaaatctttccgaaataacttcgattcaatccgcagaatgcggaaatatcttctacagaaatatcattctgaaaattctgttcaatgtacgaaagagcttctttaatataaaaatcccggatacttccgttttgcttcacatgaactgtcgcagcagaacgcatgaaataatctaaaaataaatagagatgtccaattagatgaaacggagattcttcgggatgacggctcagataaagcatttcttccatcatctggttgcgaagttcctttgaacttgcatgataaacggggtgattcaggctcagacctgcggttgtgacaatctcgcgggcccgaagaccgtcgaattctacccacgtatattcccacggaagcttagaatcagcaatataagtattgacctgtcccggaaaaagcatgaagccttgtccactttttacctgccaagtgatggtgtttccgttttcatcatctgcaagtaatgttcctgttccggaaattacataatggaaaatgtaatgatttcttgctgcaggaccgaacgagtgagccgatgcacattgttcccatccatattgatataatcctagatcaacaaaattttcatttggaaatacagaaaaaagtaagtcgctcatataaatcacctctgatagcattatatatcaaaatgctagatgacttcaatatatgaatgaaaaaattgcattttgctataaaactaaaaaaactctgatatttatagtggcataaagatatgttagaatttgattatcaaatagataacctgaataaaaggacagaaatattccggaatgtgtcaaaatgaaaggtgtatggtaaaggaaggagtaaggaaatgtataaaaaaagcaatcgaatcatttgcatgggattgatgctttgtatgacttcggcaatggtactcggaggttgcggacagaagagtgaaaatagcggaaagatagaaatcgagcttgtacagtataaacctgaggcagtgaaaacatttgaaaagattgaagaagaattcaatgcaactcatgatgatattcatttgacgattgaatctccgaatgatgcaatgacagtacttaaaacacgttttatcagagaagacgctccagatattatcggaatcggtggagatgtcaatttctctaactttatagattctgatatgcttatggatatttcagattatgaaggtctggattctataaaacaggcttatctggatatagataaagcgttggaatttgtacctgaggacggtgtgtatgccgttccatatgtggcaaatgcagcaggagttctgtacaacagagcaatgtttgaggaatatggctgggaaattccggaaacctgggatgaatttatagccctctgtgaacagatccagagtgaaggaatccagccattgtattttggatttaaagatacatggacttgtcttgcaccgtggaatgcgatcgccgttgatcttgcaccggcagatgtctgcagccaggtgaacaaaggagagacaacattttcaaatgaatatagagaagtagcagaaaagacaaaggcactgcttgcatatggatcgaaagatcctttcgcttatgattacaatggagcttgtacagcatttgcaaacggagaatctgcaatgtacacgatcggaagttatgcaatcccacagattcagacagtaaatccagatatggatatcgattcttttgtaatgccggctaataatgatgcatcagagaacaagctgaactctggtgtggatcttcagttcagtgttatgaaagattgcgagaacaaagaggcagcgtatgaagtgcttaatttccttttgaaagatgaaaatgtacagagttatctggatgaacagaaagcggttccttgtaaggaaggagattttgaacttgcttcaacacttgatggagtgaaatctttcatagaagaaggaagaatggcagattaccaggatcattactatccttcagagatgtcagtagatgcacagatccagacatttcttatgaaaggggatgtggatgcattcttaacaaagtttgatacagattggaagagatataaccgtgatatcatccgcaaagtggaagattacgagaaagagcatgcggacgaagattaaggaaggggaattcaagcatgggaaagaaatcaatgagtggaagaaaaatgacctttcttctgataacaattccgatcgtggcactgtttttctgttttaatacattgccactgatcaaaggtgtgatttacagttttacgaatttcaaaggttatggaagctttgactgggtaggacttagaaattatcaggatctttttacagacagcagagtcggaggttcttatctgtttacatttaaacttgcaattgtagctacgattgtgacaaatgtaatcagtttgatccttgcacttggactgaatagtaagattaaattcaagagtgcgtttcgtggtgcctactttattccaaatgttctcggagcgttggttgtaggatacattttcaattacttttttacatacattcttccggctttcggagaaatgcttggaagcaagcccctttcttccagtatgctgtctagtacaaaactggcatggatcgcagttgtaatcgtgtgtgcatggcagtcgattgcgatgaatacaattatttatatttcaggactgcagacagttccggaggatgtttacgaagcaggagcgattgacggtgcaacaggatggaataagttcagacatctgacattccctctcattattccattctttagcataaatatggtactctgtgtgaaaaacttcctgatggtatttgatcagatcatggcgttgaccaaaggaggtccggcacagagtacagaatccatttcttatctgatttataacaatggtatgagtggcggtcagtttggattccagagtgcaaacgcagtgatattctttatcgttattgttgtaatttctgtattacagatgacaatcacagggaaaaaggaggaacagctgtaatggaaaaaatgaaaataaaagaacgagtaaactggcctgtaacgattttacttttacttggtctgattacggttgcttttccactgtatatgacaatcgtaattgcactgaagaagccttctgagatgacgaatagtatcagcggaatcctttccttgccaagtcatttgagccttgataattttgctgaggcaatgagagtgacagatttctggcattctctcggaaacagtgtatttattacacttgtaacagttgtcctttcaattctgattcattcactgttggggtatgcaatcggaagaaataagaagagtaaattttacaaattcatttatttctatgttgtcagcggaatgtttgttccatttgcaattctgatgatgcctgttgtaaaacagacggcgcagatgggactggcaaacagagcaggagttattattctgtacgttgtattttatatgcctatgaatgtattgctttattcaggatatttgacaaatatcccgattgcattggaagaagcagcctgtgtggatggcgcgagtacatggaaaacatattggaagattgttttcccgatcatgaaaccaatgcatgcgacagttgcagttctgacagcacttggtacatggaacgatgttatgacaccgcttgtgatcatgtccggttcaggaagcgggaatacacttccactggcacagctaaacttccagacacagtttggaacaaattataatctggcatttgcctcctatctgttggcattgcttccgattctgatcttctatctgatctgtcagaagcatatcctcaacggagttgttaatggagcagtgaaataataaaaagtaaaagatagcgaagcgagaacagacagtaatgcagatcttgcttcgctaaaatggaaaacaggagtatttagatatgggaattatatattgcgagaaagacagaacatttactttacagacaaaaaatacaacatatcagatgcaggtggatcgctatggatttttgttacatctatattacgggaagaaaaccgatggatgtatggactatcttctgacatattatgacaggggattttcgggaaatccatatgatgcgggagaagatcgtacgtattcaatggatacacttccacaggaatttccgtgttacgggaacggggatttcagaagtacagcatttgcagtagaaaatgcagatggaagtatgagttgtgaccttcgttacaagagtcataaaatctttgatggaaaatataacctggaaggacttccggcagtttatgcaagtgatgaggaagcacagacactggaaatcttaatggaagatccagtgacaggagttaaggtggtgcttctttatggagtgctttccgcacaggatattattacaagaagtgtaagtgtgaaaaatgaaagcagtggcaaaatctatttaaacaaaattgagtcagcaagtctggatttcctttacggagattatgagtttctaacattttatggtagacatgcgatggagcgaaatgttcagagagttccggttgtgcatggaacacagaaaatcggaagtgtcagaggaacctccagtcatcagtacaatccgatgatgatccttgcagaaaaagaaacgacagaagacaaaggaaattgttatgcaatgtcctttgtatacagtggatgtttccagggagaagtgttgaaagatcagttaaaccagacaagaatgatgctgggacttcaggaagaagcttttcgctatccgttggaaacaggagaaatgttccaggctccggaagtgattttatcctattcctcagaaggaatgaatcgtttgtctcagaatctgcatcattgtatcagacaacatatctgcagaggcaaatataaagaagaaattcgtccaatcttgatcaatagctgggaagcagcttatttcgattttaccggagatacaatctatgagcttgccaaagcggcgaaggaagtcaatattgacatgcttgttatggatgatggttggtttggaaaacgtgatgatgataatagcggactgggtgactggtttgtgaatgagaagaaactaggtggcacacttggaaatctgatcaagagaattaatgatctgggtgtgaagtttggtatctggatcgagccggaaatggtttcagaagacagtgatctttatcggaaacacccagactgggcattgacggttccgggtagaaatccggtcagaagcagaaatcagcttgtattggatttctcaagaaaagaagttgtagatgaaatttatgatcagatttgcaaggtgttggatcaggggaatatcgaatatgtaaaatgggatatgaatcgaagcctgatggatgtttattcttctgtaacaagagatcagggaagagtgttacatgattatgtattgggactatatgattttctggaacgtcttgtgcagagatatccgaatctgctgatcgaaggctgcagcggtggaggtggaagatttgatgccggtatgatgtattacactccgcagatctggtgtagtgataatacggatgcaattgacagattacggatccagtatggaacatcctttggttatccggtatcggtagtaggttctcatgtgtcagcagtgccgaatcatcagacgggaagaaagaccccacttcatacaagaggtgttgttgcaatgtccggaacttttggatacgagctgaatcttatgaaactttctgaagaagaaaagcaggagatcagagagcaaatcgcagaatataagagctatgcgtcgattattcagaacggattgtactatcgtctctcaaatccgacaacagaagaaatctgcgcatgggagtttgtgcatacagatgagaaagaacaaagtaaagttcttttaaatatagttatgcaggtgattcatggaaatatgacagtaaattatgtaaaacttcaagggcttgaagaaacagctgtatatcgagaagaaaagagtggaaaaagatacaccggagctgcacttatgtatggcggcatgccgcttccgatagagccgggcgaatatcaggcatatcagtattgttttgtgaaagagtaaaataaattggttgacgatggaacagaaaatggtgaagaatgtgaataatacagaaaaaatctttgcacagcgtatggaaaaacatcaggatgaattacgctggctttacatggagttgtatggaaatgatgcaatgtatgcagaactttgtgagcagatgcatgattactacttgaagcgtagcacagagttgaaaaaaagagatattaagaaagaaaagaatcctgactggtttaaggaaaaagaaatgcttggcatgatgttgtacattgacaactttgccggtaatctgaaaggtgtagaaaaaaagttagcttatctgaaagagtgtaatgtaaattgtcttcatcttatgccttttctggatactccgaaaggaaaatcagacggtggatatgcagtggcagattttcggaaagtaagaccggatctcggtacaatgaaagatcttgccagattgacagaaaaatgtcatgaaaatggtatgaatgtatgcatggatttcgtgatgaatcatacttctgaggaacatgagtgggcaaaacgtgcacgagcaggcgaaggagaatacatgagccgttatttcttctatgataacggtgatattccggcgagatacgaagaaactgttccacaggtatttcctacaactgcaccgggaaatttcacatggcttccggaaatcgggcattatgtgcttacgacgttttatccatatcagtgggatttaaattaccgtaatccaagagtatttaatgaaatgatgtataactttctttttcttgcgaatcagggaatggatattatccgtatcgatgcagttccttacatctggaaagagttaggaacaagctgcaggaatctgaaagaagtacatacgattgtcagaatgatgcgcatgattgcagaaattgtctgtccgagcgtgatacttcttggcgaagtggttatggagccggaaaaggtggtgccgtactttggtacagttgaaaaaccggaatgtcatatgctctataatgtgacaacaatggcgacgacctggaatagtattgcgacaagagacatccggcttttgaagaaacagatggatatagttagccgtctgccaaagcaatatacatttttgaattaccttcgttgtcacgatgatatcgggtgggggcttgattttgatacaatgaaacaatggggaatggaagagccttctcataagcgttatctgaatgattatttcaccggaaagatagcagacagcatcagccgtggagagttatataacgatgatcctgtaactcaagatgcacgattttgtggaacaacagcatccatgtgcggaattgaagcagcgggatttgaaggaaatgcagaaaaaatgcagacggcaattcaagaagatctcatgctccacgcttacatgttgacacagtcgggaattccgatgctttacagcggggatgagttaggacaggtaaatgattatagttataaagatgatgctgaaaaagcatctgattcacgttatctccacagaggagcattcctgtgggaactcgcggataagagaaaagatctttctactgtacagggacaattgttccagatgttgaaccgattggaacagatccgaagacaggaaaatgtcttttcccaggaagcagaagtatatacttatgatgttcacaatgacagtattttaggaatcctcagagagtataagggagaacgatttattgcactgtttaatttcagcgaaaatgaacagactgcgtggatgcaggaagaaggcattttcagaaatctggtgaatggtgaaattgtagaagtgaaagatccagtttcgaaaggctatgaatttgtttggatgaaatataaagcataaaacaaaatgtaaaatatagataaaaagattgaaatactgaaagaagaattgtataattttacctataacaacaaaggaggatctttgaaatggatcgtttgaaaggtaaagtagctattattacaggaggtaactcaggagttggagaagcaacagcaaagatgttcgccaaagagggcgcaactgttgttatcacagcgagaagagaggctgcactggagaaagtagcagaagagattaaggcagcaggaggagaagttttcgctgtttcaacagatatctcaaagaagggagatccggagcgactgatggatctcgtgatcgagaaatatggcaaggtagacattcttgtgaataatgcaggaattcttgaggaaggactgaaaccaatcgatcgattctcagacgaagatcttgatcgtatcgtagagacgaacgaaaaaggaactatgcgttgcatgcgtgctgcatcacagaagatgcaggcaggagcatctatcgtaaatgttgcttctatcgctggagtgaaaggatgtggcggagctgcttatgtagcatctaaagcagcaatcgtaggagtgacaaagcatacagtacttcgtttccaggcaacaggaatccgttgtaatgcaatctgcccgggaaatatcattacaccaatgacatcaggaacaaatccggcagcacttgacccggatatgatcggtgcaatgtcaacacacagtaatcttagaacaccatcttgtacagcagaagatgtagcaaatgtaatcctgttctttgcaagcgatgaatcaaaggcgattacaggacaggcaatcgtaacagatttcggagctatgctgtaaggaaaataagatagcaactatttaaaaaggacagaaaggttaacaaagcgaaacctttctgtccttctttgtatataaataaaaaagaatgttgcaaaatgaaacataaaagcgtatactaaaagaaaaaaagcggtgattctatgaaaacaaaatttaacgagtatttgacaaaattacgtaaatcccgggtctacactcaggcgcagatggcagaaaaattggggatttccagatcgacttataccaattatgagaatggaaaccggacaccggactttgaagtactggaacgaataagtgaggtgttagcctgttccttagatgaattatttggaagaaaaccaacttatgttgcaagttgtgacgcggtaaaggaagacagcattctgtacaatgtatctgggatacaagaggaaaaacctaaacttgcaataggagtacaggactttcgcgatttgcgtgaaaaacaagcctattatgtggacaaaacacagtttattgaacagtttttagaatcctggtatcagattacattaattacaagaccgagaaggttcggtaagacacttaatatgtcaatgttggcagaatttcttgactgcgcaaaagattcctccgatttattttgtggaacaaagattacaaaatctgtccactacaaggagctcaatcgatatcctgttgtatttttgtctttccttaacgtgaaagcgggggatgcagaatctttgtgttatgcattgaaagatactgtacgtgcggagtatgagcgcttttatcagatggttaatgatggaagactgtcagaattccaggtgaaagaattcaatatgatttataatagtttatgtcaggaaagcatcggaaaagaaatagaaaatcatgtgattcgttcaatcgctgttctttgtcaggtactgagtgcgtattatggggaaaaagtatttttactgttagatgaatatgatactccgtttatgtctgcaaattccgaaggatattatgatgaagtaagagccatgttgaatcgttttctggcaacatctctgaaaggcaacgattatcttcaaaaggcaattctgacaggaattcagagaattgcgaaggaaaatatattttcgggtctcaataatttagttgtctgcacagtgcaggacgaagattatgatgactgttttggttttacagagcaagaagtaaaagagctgcttgcttattgtaaagcagaattttcagatgagctgaaaaagatgtacgatggatatcattttggcagtacagatgtatataatccatggtcaatatcgtgttatgcggcaagaagaaggatggattcttattgggttaatacaagcgaaaacagtattttacgtaatgcacttgaagtacagggaaggtcttttgagaaagaatatgaggccttggtcacagaaggtgaagtagaagtgatagtagatttttcaatggcttattatgaaaaaatggacgaagcaaatctatggggacttcttgcaaatgccggaattgtaacaattacaaaagaaatcgaagaggactattaccgacttcgggttcctaatctggaagtgtggaaagtgttcaaagaattaacagcatgtcatctgaaaatcgatgagagacatatggaaaagatgttaaatgctcttaaaagaaaggatatggaacgttttgcagaagagtatcagagagttcttttggaattgccatcttatcatgatctgaaagatgagaatagttaccatatgatgacgcttggaatgtgtgcatttcttagaaaggattatgatatcaaaagcaatcgggaaaccggagaaggcagaagtgatatctgtctttatgcaaaacatgacagatatccaaatttaattttggaattcaagtataccaaagatgaaaaagacgatttagaaaagcttgcagaaaaggcactggaacagataaaggaaaaacaatatgacgcagagatgaccggagaagtgtgttatgttggactggcacattgtgggaaaagagttactgttcactcccgtgtcaatcactccgctgattgacacggaggatgcatgttttggcttgaatgcatctcgccccatcgccaaaggcaatttaaaatggcgagatgcgttgctggtcgcacattgtgtgaacagtaacggaaaagatcttgtatcagatggagaaaaaacggttgacatctatcagacaagcttttatactaatcatgtgaagaaaacacggggagcttgtgtaccaggctgagaggaagttgagaacttcgacccataacctgatttggataatgccaacgtaggaatgtataaagcagtactttagagagatacatttgttggtatctctcttttttaatattaggaaagtgttttcctaatatataaaacgctccgctaaggatgcacactgcggcgtacaatgtagatgtcgcaagcgaccgccgcaggcgcaagaatatgccaaggcacattctttgttactaatcaggaaaaattgaagattggagtaagttgagattgaacgagagttcatgaaggggtgcaccaccacgggtacatttctttcatgaactctttttttcaattatccggaaaggagtagttatgattacagtaaatggaaagcagatccagctgacatctgaaatgagtgttgcggattatctggagcagaacaattaccagattaatagaatcgcagttgaaatgaatgaagaaattcttccgaaatacagctattcagagacaatgctcaaagacggtgaccgtctggaggttgtgacatttgtaggaggaggctgatatcagatggcatcagaaagaatattaagcaaagaagaaatcgaaacagcgctgaatgaacgccattcgccggaaaaacagaagcttttatcagtcggtcaggtgacgattgccggacttggtggactaggttccaatgtagcgtattcacttgcacgaattggagtagggcatctgcatctgattgattttgatgtggtggatattaccaatttgaatcggcagcagtatttcatggagcatatcggaatgtataagaccgatgcgctaaagtcactgcttttaaagatcaatccatatctggatattcgtacagattgtgtgaaggtgacagaagagaatttgaaagaactgtttgcggatgctcagattgtctgtgaagcatttgataatccggtagcaaaagcaatgctggtgaatggaattctggagcattttccggagaaaaagcttgtgtctgcaacaggtatggcaggctatgaaagcagcaatataatcagtactaagagaatgatgaagaacttttatttatgtggagatcgtgtgacagagccgacttatgggaatggattaatggctccacgagttgcaatctgtgcagggcatgaagcaaatatgatcacgcgtttgcttcttggagaagaggatgtatagaaagacatctaaatgaataaaaaagaaagaaggatttaagttatgaatcagaaagatacatttacacttggaggaaaagaatttagttcacgttttattctgggatcaggaaaattttcgcttgatcttgtgaaagcatgtgtagaaaaagcaggagcgcagatcattacacttgcgcttcgtcgtgcaaatgaaggaggacttgcgaatattttggattatattccggaaaatgtaacacttcttccgaatacatcaggagcaagaaatgcagaggaagcagttcgtattgcaagactttccagagaagttggttgtggtaactttgtaaaaatcgaagttgtcagagattccaaatatcttctcccagacaactatgagacaatcaaggcaacagaaattcttgcaaaagaaggctttgtagttatgccatatatgtatccggatctgaatgcggcaagagatctggtgaatgcaggggctgcctgtgtaatgccacttggggcaccgattggttctaacaaaggactttgtacaaaagacttcatccagattttgattgatgagattgatctgccgattattgtagatgcaggaatcggacgtccatctcaggcatgcgaggcaatggaaatgggagcgacagctgttatggcgaatacagcaatcgcaacagcaggaaatgtcgaggagatggctgaggcattcaagaaagcaattgaagcaggaagaagtgcttatctttcaggtcttggaagaacaattgaacgaggtgcaagtgcatcttcaccattgacaggatttctggaagactaggaggcagttgagatgaatgatacacatgttaatgaaagtattttaagtgaagaaatactggaagatcagaagaaaaacagaatcgatcatatgacttatcttccgggaatggaggatatcggatcagaaatcatggatcaggtgatcgaggcaatggaagcctatgattatagtaaatatacggcagcagatgtgaaaaatgcacttgcacattcggaacgtactccggaggatttccgtgcgctgttatcaccggcagcccttccatttttggaagaaattgcccaggcagcccagacagagacaagaaaacattttggaaacagtgtttatatgttcacaccgatttatattgcaaactattgtgaaaactattgtatttattgtggatttaactgtcacaataagatcaaccgtgcgcaattgaatgcagaagagattgagaaagaaatggcagcaatcgcagagacaggattacaggaaatcctgatcctgacaggggaaagccgcaacaaatctacagtagagtatattggagaggcatgcaagattgcaagaaagtatttcaaagtgatcggtctggaaatctatccggtcaattcagatgagtatgcgtatctgcatgaatgtggagctgactatgtgacagtattccaggaaacatataattcagataagtacgagacacttcatctggcaggacataaaagaatcttcccataccgtgtcaatgcacaggagagagcagtaaaaggtggtatgcgaggagtcggattcggtgcgcttttaggactggatgattttagaaaagatgcttttgcaacaggatatcacgcatatctgttacagagaaaatatccacatgcagaaatcgcattttcctgcccaagacttcgcccgatcatcaataatgacagaatcaatccgatggatgttcatgagccacagcttctgcaggttgtctgtgcatatcgtctgtttatgccatttgcaagcattacagtttcaacaagagagtgtgcgcgtgtcagagataatcttgtaaatatcgcagcaactaagatttcagcaggggtaagtacaggaattggaagccatgtggatgatatcgaggataagggcgatgaccagtttgagatttcagatgaacgttcggtagatgaggtttatgatgcattattgaaaaataatctccagccggttatgagtgattatatttatgtgtaagatgaaatgcgatttatcggagatggatttgaaaattatagctgtcagtaatagaaaactgtgcgaaagaccatttttggagcagattgaacgggtttgtcagatgaaaccgcaggcaattattttgcgtgaaaaagatctgtcagaagaggaatatcggattctgtcagaagaagttctgtctgtttgcaagaagtatgagattccgtgtattttacataagttctggaaaacagcattggaattggaatgtacatctgtacatctgccattgccggaattaaggaaacttccggaaggtgtgaaagaacaatttcaaagaatcggtacttccgttcattcagtggaagatgcaaaggaagcagaaagacttggtgtgtcttacatgacagcaggacatatttatgttacagattgcaagaaaggcctggcaccgagagggcttggattcttaaaagatgtctgcagtactgtgaatgttccggtatatgcgattggtggaatcaagtttgatgaaaaacagtgggaagaattgaaacaaaatggtgcttccggaggatgcattatgtccggaatgatggaactataaaccatgagatatcatgaaatagaattaatgaagcaatacaaattaacttgacctgaaccgggctttacatagtataataaatgcacttgattacgaggatttatgaaattgtaattaggtgcattttttgcatgaaaagaattacgattgatagaaaaaatcagaacagcaacaagacaggaggaaaaagatgcaggatgaattacataataaattagcacatttaaaagagtacataaaagaactggacagtgttgcgattgcattttccagtggagttgattctacatttttattaaaggtggcacatgagatattgggagataatgtgatggcgatcacagtacaatccggttcctttccaaagagagaactaaatgaggcaattgtattttgcaaaaaagaagatatccgtcatgaggtctgtcaggtggatgaaatgaagattgaaggattttctcagaacccaccgaacagatgttatttatgcaagcatgcactgtttgaaaagattggagcaattgcagagaaaaatgaaattgcttatgttgcagaaggttctaatatggatgatcttggcgactacagaccggggcttcaggctgtggcggaattaggagtaaaaagtccactgcgcgaagcaggacttacaaaagcggagattcgtgaattgtcaaaagagatgggactttcaacctgggaaaagccatcttttgcctgtctggcttcaagatttgtatacggagaaacaatcagcaaagagaagttgatcatggtggaaaacgcagaacagttattgcttgaacatggcttccggcaatttcgtgtccgtatgcatggaaggatggcgaggatcgaagtactgccggaagagtttttgaagttgcttcaggaagaagtccgtgaggatattgtaaaacaatttaagcagttcggattcacttatgttacaatggatctaacagggtacagaatgggaagtatgaatgaaaccctggataagaagaattagaatgaggcgaaaaagatggaacaaaaggaaatgatagatcttttaagacaggtagcatccggaacaatggatgtagaacaggcagctttgaagttaaaagaagagccttttgaagatcttggttttgccaagattgaccatcacagagccatgcgccagggtgtggcagaagtgatttatggagaaggaaagacaccggaacagattttccggattgcagaagcaatgaaggaaaagggacagaaagcagtcctgatcacaagaatgaataaggagtcagcgatttacgtgggagaacacctggaacttcaatatgacgaagtcagccggattgggtttataggcgaagctccaataaaggatggagacgggaaaatagttgtggcaacaggcgggacaagtgatatccctgttgcagaagaggctgcaaggacagcagagacacttggaaatgaagtaatccgtttatatgatgtaggcgtcgcaggagtacatcgtctgcttggacatctcgacgaattaatggaagctcgtgtcattattgctgtagccggaatggaaggagcactcgccagtgtgattggaggactggtggattgcccggtgattgcagttccgacaagtgttggatatggagcatctttcggtggcatatcagcgcttctttctatgttgaattcttgtgcaagcggagtgagtgttgtaaatatcgataatggatttggcgcgggatttcttgcaagccggatcaatcacatagagaggagaacgaaggaatgaggacattatatttagactgtgggatgggagcagcaggggatatgctgacggcttcattattgcagttgttttcagaacctgtaaaacaggtgaaaaagttgaataatctgaaaatcccgggggtaaaatatcagttggtggcgtgtacaagaggcggaatcagaggatatcaggtccgcgtgtttgtgaaaggacaggaagaagagaatcctcatatgcagacggaagagcagatcggacataaatcagaagaaccagagaagcatacacaagaacacggacatcactcaatgtctcagatcgttcgtctgatcaatcggttaaaaattgaagatcaggtaaaacaggacgcagttgcagtctataaattgattgcaaaggcggaaggaaaggcgcatggtcagcgcatggatgaaatccatttccatgaggttgggacgatggatgcagtggctgatgttgtggctgtctgctatttgctgaatgaacttcaggtggatcagattcttgcgtcaccggttcgtgtcggatatggtcatgtgaaatgtgcacatggaatccttccggtgccagcaccggcaacagcgtatctgatgaaagaaattccaatgtatgcaggagacctggagggagaattctgtacaccgacaggagccgcacttctgaagcattttgttaaaaagtatgaacagatgccggttctgcagatggaagaaatcggttatggttttggaaaaagagagtatgaaagactgaactgtgtgcgtgcgattcttggagaaacgcaagacaaggtagaagaagaaattttggaactgtgctgtaatttggatgatatgacttcggaggaaatcgggtatgcgacagagcttctgatcaaagaaggcgcattggatgtttacacatcctccattcagatgaagaaaaaccggccggggattctgcttacatgtatgtgccgggcagagcagaaagagtattttctacagctgatattcaaacacacttcaacacttggtgtcagagagtatttttgtagaagatatggacttaagcggaaaatagacgaagtgcagacagaatatggaaccgttcatgtgaagagagcatctggatatggagtggtgaaagaaaaactcgagtatgatgatgtttcccaaattgcagaagaacatagctggtctgtagcagaggcaagaaataggatctatggaaaattataattttaatatacaggaagaattgaaaaagcttccgggaaggccgggagtctatctgatgcatgatgagacggatcagattatctatgtcggaaaagcaatcagcctgaaaaaccgtgtgcggcagtattttcaaagcagcaggaataaaggggttaagatcgaacagatggtaacacatatccgccgctttgaatatattgtgacagattcggaactggaggcgcttgttctggaatgtaatctgatcaaggaacatcggcctaaatataatacgatgctgatggatgacaaggcctatccattcatcaaggtgacaacaggagaggaataccctcgtattatgctggcacgtcagatgaaaaaagataaggcacgttatttcggtccttatacaagctcacaggcggtgcgtgacacaattgatctgatccataagctgtatcatataagaagctgtaatcgttcacttccaaaagacattggaaaagagcgtccgtgtctgaattatcatatcaagcagtgtgaggcaccgtgccagggatacatttcccaggaagaataccggaaatccattgatgaggtgatccgttttctaaatggaaattttgatatgattttaaaagatctggaagataagatgatggccgcttcggaggcactggaatttgagaaagcaatcgaatatagagagttattaaatagtgtaaaaaaggtggctcagaaacagaagattacagattccagtggggaagacagagatgtcatggcagttgcatgccaggacgaagatgcagttgtacaggtcttttttatccgtggcggaagattgatcggaagagaccatttttatctgagaatcagcgaagaggataaaaaatctgaaattctgaacagttttatcaaacagtattatgcaggaaccccttttcttccgggtgaactgatgctgccggaagaaatcgaagagcaggaacttcttgaatcctggctgagcgcgaagaaggggcagaaagtaacaatccgtgtgccgaagaaaggtacaaaagaaaagctggtagaactggcggaagagaatgcgaggatggttctgtctaaagataaagagcggctaaagagggaagaaggacgtacgattggcgcagtgaaggagatagcatctttactggggctggaaaagatcgtccgtatggaagcatatgatatttctaatacaaatggtttcgaatcggtaggctctatggttgtctatgagaaaggaaaaccaaagcggaatgattacaggaagttcaaaatcaagagcgtgaaaggaccagatgattatgcgagcatgcgagaagttcttacgcgtcgttttacacatggattaaaagaacgtgaggagaatgcggaagctgggaaatttacaacatttccggatttaattctgatggatggaggccgtggacaggtaaatattgcattgcaggtgcttgatgagttgaagctgaatattccggtctgtggtatggtgaaagatgacaatcatagaacaagaggattatattataataatgtggaaatcccgattgaccgcaattcagaagcatttaaactgatcacaagaattcaggatgaagcccatcggtttgcaatcgagttccacaggcagctgcgtggcaaaggacaggtacattccgttttggatgatattgaaggaatcggtccggccagaagaaaggcattgatgcggcattatctgagcctggatgcaatccggagcgcaacagtagaagaactggcgcagcttccgtcaatgaatgagaaggcagcagaatcggtttatcaattctttcatgattaagggttttatcgaaaagaaaatcatgatatacttatgtacaggcgatgggacatgtagggaaatgttggatttatgcgagcagtaaatatcatatatctcttgagcttatcaaggcagcatgtctgaaacgaaaagagatacaggaaaaggagattacaagatgagtggtgtgaaattaacagatatcgttgaaaagatgaatctgaaaaatctcactccggaagtggatgtcacagaacgtgaagttcttgttccggatgtgaacagaccggcacttcagctggcaggatttttcgatcattttgatctgaatcgtgtacagattatagggaatgtagagtgtgcctatctggagactttggcagaagagaaaagagttgagatttatcagaaacttctggaacataaagtaccatgtattattttcagcaatgaacttcagccggatgaaagcttcatcgagattgctcagaaaaatgatattccggtattcggtacatgtaagaagacatcctcctttatgggagaactgatccgttggctgaatgtaaaacttgctccgtgcatttccattcatggagtgcttgttgacgtatatggtgtcggagttctgatcatgggagaaagtggaatcggtaagagcgaagcagctcttgaactgatcaaacgtggacatcgtcttgtgacggatgatgtggttgagatccgcaaagtcagtgacgatacactggttggttctgcaccggatatcacaagacattttatcgagctgcgtggtatcggaatcgtggatgtaaagtctatgttcggtgtacagagcgtaagagaaacacagaatatcgatctggtcattactctggaagactggagcagagagaaagaatacgacagacttggtctggaggaggaatatacagaattccttggaaaccgagttgtctgccataatattccgatccgtccgggacgtaatctggcgatcatcgtagaatctgctgcagttaaccacagacagaagcagatgggatacaacgctgcacaggaattgtacaaacgtgtgcaggagaatctggcaaagagaagaaaataaaacaaaagagaaacagaggatgcggtacaaatgttacagagtaccgcattctcatgtgaaatataaaaagaaacggagatagatttatgaaatattgttttggtgttgatatcgggggaacaacggttaaacttggtctgttcagtgaggcaggtgctattgtagagaaatgggagatcgtgacaagaactgagaatgaaggtgcggcgattcttccggatgttgcagaagcaatcaatggtaagttagagcagcacggcattgagaaagaacaggttcttggaatcggtgtcggtgtgccggctcctgttactgtagatggaattgtcaacggttctgcgaatcttggctggaaatataagaatgcaaagaaagagctggaagaactgacaggattgacagcagagtttggaaatgatgcgaatgtcgcagcacttggcgagatgtggaaaggcggcggtgttggttaccgtaatatgatcatggtcacacttggaacaggtgttggcggtggcattatcatcaatggaaagatcctgataggagagaacggagcaggtggagagattggtcatatgtgtgtgaatctggaagagacagatacttgtggatgtggcagacacggatgtctggagcagtatgcatcagcaacaggtatctcacgtcttgctagaaagaagatggagcatgagacacgtgcaacaatcctgacaaaagaagacctttctgcaaaagctgttttcgatgcagtgaaggaaggggatgaagttgcgatagaggttgcgacagaaatgggaaattacttagggcatgcaatggcagatatgacagcagtactggatccggctgtatttgtaattggcggtggagtgtccaaagcaggagaagttctgctttcatttattgaaaaaccgtttatggagaaagcgttctttgcaaataagaatgtgaagtttaagctcgctacgcttggaaatgatgcaggaatctgtggagcggctaagctggtacttgaggattgatagaagtataacaagtacagaaaaaatagtggaaacaaaaagaggagatttttacagatgttagatatctgtgaaatcccctcttttttctttgaaaaatttattatgcaagcactttcttgaaactaactttaaagtatatggtttctgcaattgctgtgagtccccaggagaagatgtacagcagatacagagatgggattgtatggaagtaagcaaataccgtatagatccatataatacgaaatacacaggatcccatgattacaataaatgtaggagcaatactcttgccgattcctctggaagcggcaattgcacagtccataaaggcactgaatgcataggagaatcccataatcctgattctatgcatacctgctgcaataacggccgactctgtagcaaacagagacaagaatggccgtccgaagaagaagagtgatccaccgagaatcagtcctgcactgaaagaataggtaagtgctacgaaataacattttttcatcctctctttattccctgctccccagttctgactcatgaaactggaacaggccacgtagaaggcaaacataacattgtaaatcagattatctgcattcgcagcggcagcatttccggaaaccatgatcgcatcaaaagagttgataccggattgaacgaaaaggtttgcaatcgcgaagatcgcattctgcagacccgatggaacaccgagataaagaattccttttccataaatgttatgatagcgtaatttacgcaggctgactttacacatatcatcgcggcgcattagatggatcaggatcaatcctcctgaaacgtactgtgcgattgcactggcagtggcaactccgacagcagccatatggaatacgataacaaagatcagattcaatatgacattaagtattccggcaaatgcaaggtaatacattggacgttttgtatccccacgggcgcttaagacgccgttaccgaaattataaattgccgtggcaggcataccaagtgcaaaaactttcatatagagaacagcctgatcgagcagttccggctttgtatttatcatggaaagcattggtcctgcaaaaagcagacagatcagacagacaaaaatacctgctgctgcacaaataatcagtgcggagtgaatggtttcttttgtagctttctcatcaccggcaccgagtttgttggcaacctggacattgacaccacttccaagtccgatcagaagtcctgtgaacagtgtgacaagtgtagtggtcgagccgacagaaccaagtgctttgtaatctgcaaaatgtccgacaacagcgacgtcacttaagttgaacatcacttccaaaatctgggaaaacataagaggaacactgaagaaaaacatgtttttccaaagagatccctgagtcatttcaattgttcgctttcgtcttttcgttatttcattactcattccctaacaacccctttaccagataaaataatgaaagaaaacagatgaaatcacaaaaaaaacatcacttccaaaagaaagcaatgcattttaaatcgcctttggcgatggggcaagatgcattcaagtcaaaacatgcatcctccgtgtcaatcagcgaagtgattgacacgggagtgaacagtaactatctgttttctggttaaaatccgatgattcttatatacagtgtagcatgaaaagtgcggggaaacaacaggaaaaacaataatttttttccaatgattcttttatttttttagatgaatttaagccttgaaaataaatttttacgacaagaagattaaaataaatcaagaaaaagattaaaataggctcttgatttctgatttcagaggactataatgtcagagtaaacaaaatacagttcaccaaaattcgttgatgagaacaaaaccgtatccgtcattattttcagagagtctgtggctggtgtgaacagacaataaccgggtaaggatatcctctctaagaagcgggctgaaagcggatgaaaatgttgcaagtaaacctcgccgggatccaccgttatatggatagcatatgttggtatgtgaagtgtcgcagaattgatttttgcggaattagggtggtaacgcggattatattcgtcccttttcagattgatttctgaaaagggacttttttctttgaatatatctcaagaagaatacaaattttaggtgaacaagaatcctaaggaggtattgtaatgaaagcattacaaaaagtcagcaaatttttatcagattatacttcagtggttgttattgccattgcagtagtgacattctttgtcccgacaatgatgggatgggttaacaacgctttgtttgtcgatccggtatccaataaatttacctgtcagtctattattatcggagtgatcatgtttagtatgggtctgacattaacaacagaggattttaagattcttgcgcagagaccgtttgatatctgcatcggagcaatcgcccagtatctaattatgccattccttgcatttgcactgacaaaggcgttgaatcttccggatggaatcgctttgggactgatccttgtcggatgttgtcctggtggtgtgtcatccaatattatgtcctatctgtgtggtggagatgtagcattttctgtaggaatgacaacagtttcaacattgctctcaccagttatgacaccacttatggtttcactgctggcaagtggtacacatatttcaatcaaaggattacctatgtttgtatccattattgaaacagttatcttcccggtagcagtaggattcttactcaactatctgttaggaaaaaataaaacattcaaagaacttcagaaaattatgcctggtattgcagtacttggacttgcatgcgttgtcggcggtgtagtatcttcacagggaagcaaattctttgagtccggtgttgtaatcttcgtggcagtatttcttcataatggacttggatatctgcttggatacggagctggtaaactcacaggaatgaatacagcgaagaagagaacaatctcgatcgaggtaggtatgcagaatgcaggacttgcaacaaaccttgcaacaacaacagcacagtttgcatccacaccggagtcagcaatcatctgtgcagtatcttgtacatggcattctatttcaggaacactccttgcaggaatgtttgcatattatgataaattcaaagaggacagagaatccaagagtgtgaatacaaaagaagaagcagtataaaaagaatgaaatgataaggcagaggtaaaaaataattgatttagaggatggtttggcacaacgaacaagaaacgttcgaacgtgagaaaaccatccttttttctgtgttgcatggtaaggaaaatcattttataataaataaggcaagagattttatctgaacataagaaagcaatcagagttcggaacaaaagagaaatacaagaggggaaatgtaaatggaagaaaaagaaaatacagaaaatacggggatgggaaaacgaaaacattcccacgatacaaaaatagtaataaagtattattatgaaaggatccgacagaacacgtggaattttctgaaatggatggggctttctgttttgacaggtctggttgtaggcggtgcgagtgcagtatttgcaggatgtatcaaggcagcaacggaatacagggatacacacaattggatttttatgcttttgccggttgcaggagttctgattgtatttatgtatgagaggataggaagacaggacggaggaacgaatcaggtacttgctactattaaatcaaaggatgatgttccgtttctgtcagcaccattgatttttgtgtcaacattattgacgcatcttaccggcggttcggcaggaagagaaggagcgtcgatacagtttggtggaagtattggaaattggcttggaaaactggctcatttagatgaatttgatcaccatgtgatgattatgtgtggaatgagtgcagcgtttgcagccgtgtttggaacaccgatggcagcagcagtttttgcaatggaggttgcgagcgtgggggtaatgtattacgcggcgcttcttccgtgtgtgatcgcagctatcattgcggcagagtttgcaacaggaatggggattgatccggagacatttccggtacattctatcccgggacttactgtggagacaggacttaagatggcattgatcgcagtggggtgtgggattttaagtattctattttgtattctgttaaaaatagtagggcagttgtatacaaagtacttgaaaaatccgtatattagaattgtagtcgcggcaggagtgattattctgatcacaatatgtctgaatacaaaagattatatgggagcaggaagcggattgatcgcaagagctattgaaaacggtgaagcaggaccactcgatttcttatggaaaatgttacttacagcgcttacgatgcgggcaggataccgtggcggtgagattgtaccggcattcagtgttggcgcgacgtttggatgtgttgccggtggaatacttggattctcaccggagttagcagctgcagccggcatggttgcacttttctgcggagtgacgaactgtccgattacggcaatgctgatttcattcgaactgtttggattttcaggagcagcatattatctgatcgcgatatcaatcagctatgcggtttccggatattatagtttatataaagatcagacgattgtatattctaaatataaagcaagatatattaaccgtaaaacaagatagcagaatactgtatcagagagatacagacaggataacaagaacaatcagttatataggtatatgaaaaggagaggcattttatatagcctctccttttcagttgcgccttgcggcgcgtgatttacttattgagtggtacttccgcttccagtgtcgccaccagtagtgctgccggaagtatcacctgtagttgttccggttgttccagcagagtctccgccggcagcaggttcggttgttgtcccagcagaggaagaatccggtgatgaggttgttccggaagaatcggtacctgtagcaggtgtgttctcatcagaactctcagaatcatctttcttggaatcttttgatggggcaacatagtgaccactgcagctctttgtcggagcattgtcttttgagaaatactctgtaatagcaggacaactgcttgtggcaaggagtcctgttttagtacaaaccgtcttttcttcgacagaggatggaatttcaaagtctttgtactcaagtccttttgtatcctggatatgttccatgatatttttccaaagtttctgatgccagctctggcttaatctgtccattgtcttatgctcatcatatccaccccatacagacgctgtataataaggcgtaaatgctgaaatccacaagtcacggctttcctggctggtacctgttttagcggcaacaggcatgttgctcagtcttgcagaaccaccggttccaccggcaccgttgacaacgtcttccattgcacttgtcagaagataagcagtggagtcttttaagacttcatgtgtctcaggggttgtgttatcgagaagaacatttccatcatgatccagaacctgtgtgtaaagaatcggcttcgtgtaagttcctccattggcaattgctgcataggcagctgtcatctcgatattatatacaccgttcgtgataccaccaagagcttttgcctgtgaatatttatcatcttcagacagcgttgtaaatccaaaattaagaagataatcataactttctgtttcaccaacatagtcagttaatgtcttgacagcaaggacattcatagaatgttcaattccataacggacacgtgttggaccgatatattttttatcccagttgtttacagactgtccgttcttatattcatattcttcatcatcaattgttgttgcaagggtgatctttccttcgttaagtgccggtgcataagcagcaagaatcttgaaacaggatccaggctgtcttgcagaatctgtggcacggtttagagaaagactggaattcttttcgccgcgtccaccgacgatagctttcacctgtccggtatactgatccatcacaacaacagaagtctgcggctgaggtgagagctcaattctttcatcaacagtgtctccgcctgcttcattgatattgagcgttgatttaaatgcatcaactgcttcctgtgcagctccttcggaaccgtagagaagtggagtgtcatatccccaggcactctgaatataggaagcaagttgttctttactgtagttctcagaagaaccatctgccctgtggatagtaagtgcgtaatcaagcccatattctgtatcaccattgagataatcccctacattagcaacttcatcatcacagatggcctgaatatcagcatcttgtgtaactttgatcgtaaggccgccgctatagagcagattgtatgcctgtgtttctgtataactcttctcagttacaagatcatccacgatctgattgatgaccgcatcgatgaaataagtgtaaggtttggatgcagttgtatttgacgctgtttcggaaatgcggttatatacattatccgccattgcctcatcgtattcatcctttgtgatagagccttgttccttcatgtttttcagaactttttcccgtctttttgcattagcctccgggttgctgaccggattcagatttgacggactctgggtgattgctgcgataactgcacattcagaaagagtcagatcttttgcatctttattaaagtaacgctgtgcagctgtctgaactccgaggcatccctgtcctaaattgattgtattcatgtatgcctcaagaatctcttccttactcatctctttttcaatctttagtgcaaggtactgttcctggattttacgttcaattcgctgatacttactctcgttgatgaaattagggaatacattgtttttgattaactgctgggttaatgtgctggctccttctgtgaaatggaagccatgtgcaacaccattgacaccggcacggataattccctggatatcaataccgttatgcttgtagaaacgttcgtcctcgatcgcaacaaaagctttccccatgtatggtgaaatctcgtcatatttcttgtaaacacggttagaatcagagtctttgagttgctcaagcaaggttccattggaatcgacaatattcgttgtatagccctgtggcataatgtcctttgcagtgacttccggtgtattgtcaatcactttttttacatatatgccaattccggctgccccaatgacgatcaaaagcagaaaacaaataatgagggctttgaaaaaacgtacgccgactcgcttctttttccttttctttttagaagaaatttgcttttttcttctagaaagattcgattttccgtaattcacgtataatatcctcctttattgacttctatgattatatcaaatttaccgatgtaaataaaggtaaatttgaaaagttcaaattttcctgaaaatcttaagaaaaaatacagttttatatagaaaagcatggtatattagataaagaaatattttcaaatatagcaaaaataaaaaaagaatgggagactgaaaaatggaaatctaccatacaatatataagggcggaaatggagaaattgttgaaaagaaatccagatttattgcagaagtgcatccggtcacatcagaagaagaagctatggagattttagagcagacaagaaagcagtactgggatgcgagacatcattgctgggcttacattataggaaggaatccggcagcagaaagaatgagtgatgatggggaaccggcaggaacagcaggaaaaccgattctggaggtgatccgtgggagagaactgacgaatgtacttgtaattgttacaagatattttggaggtacgcttcttggaacaggtggactggtcagggattatacagcagcaacgatcgaaggattgaagaacagtgagagcattgcaaggattcatggggtgaaactcggaattgagacgaattatacggattttgggaaaatccaatatttgattgcaaatcgaaatctggatcaactagaacccgtttacacagataaggttgaaatgacagtgtttgttccgacagatgagatgggcagcctgcgggctgaactgatggaagggacaaacggtcaggtggttctggatgaagagacgacctgttggtttgcaaggacagaagatggaattaagatttttgatgaagaatgattctcatagaagatgttgttttgtgagatagaaaggaacccctgccggaatatctggcaggggttcctttcctctaagtgtgtgtcatataacattcaataaatctacttatactgaatagatatgttctatgagaattctggttcgatcagaccaaatgaaccatcttttcttttgtatactacattgacttcatcagtctcggcattggagaatacgaagaagttatgtccgagaagttccatctgaacacaggcatcttctggaaacattggtttaataccaaacttctttgtacgaacgatacggacttcatcgtcttctgttgtctcttcttctgaatcaaagaattcttttctgaagctgttacctgatggagcatatgatgtaggatgtccctgattacgagcaaccagtttgttcttatatttgcgaagctggcgttcgatgatctcttctacaagatcaatggaaacatacatatcattgcttgtctgctcagaacggataatatttcctttgactgggattgttacctcaattttctgacgtcctttttctacactgagcgttacattgatttctgtttcaggagtgaagtacctttcaagttttcctaatttctgttcgatagcatcctttaatcccggtgttacctcgatgttttttccgctgataataaatttcatgctgctcaactcctttgttcaaattatacagaagaatgattagattacttctgtatcatggttacattataacatgaaaaagattttctgtatacaataaatcgtcctaaaattatgaaaattttcaaaactttaggacgatcttaaaattatcagataattaatgaatgctattttaatccgcgagcataagcttcaaacacgaatattatttattgatcgtgctgcgttttctcattctggaatccagaatcttcttgcggatacgcagattttccggtgttacttcaagaagttcatcggtatcaataaagtcaagtgcctgctcaagactgaggacgcgcggaggtgtcagacgaagtgcttcatctgcactggaagaacgtgtgttagtaagatgttttgtcttacatacgttcagctcgatatcttcagctttaccattctgtccgatgaccataccggaatatactttttcaccggctccgatgaagagagtaccacgctcctgagcactgtacagaccataagttacggattcacctgtctcaaatgcgatcagggatccctgcttacgatactggatatctcctttgtatggtgcatatccttcaaagcttgtgttgatgataccatttccctttgtatctgtcatgaactctccacggtatccgatcagtccacgtgccgggataaggaactcgagacgagtatatccaccgtttgacggagtcatgttgcggagttcaccttttctctgaccgagtttttcgataacaactcctgtgaactcatcaggaacatcaatataagcaagctccataggctcaagtttcttgccattttcatctgtgtgatacagaacttcagctttacttactgcaaactcgtatccttcacggcgcatgttttcaataagaacagaaaggtgaagctcaccacggccggatactttgaaactgtctgcattttctgtctcttctacacgaaggctgacatctgtgttcagctcacggaagaggcggtcacgcagatggcgggatgtaacgaatttaccttcctgtcctgcgaacggactgtcgtttacgatgaactgcatagagatcgttggctcagaaatcttctggaacggaatggcttccggattctcaggagagcagagagtatctccgatggaaatatctgtgatacctgatactgcaacaatagatccgattgtagcttcttttacttctacacggttcagtccgtcgaattcatagagcttaccaatttttacacgctgctgtttgtccgggtcatgatggtttacaagaaccatatcctggtttacagcgattgtaccgttctctactttaccaactccgatacgaccaacatattcattgtagtcaatcgtgctgatcagcatctgggtcggagcttccggatcaccttccggagcaggaatgtagtcaaggatagtctcgaacagtggtttcatatcctgtttttcatcagagagatcaaggacagcaacaccagcctttgcagaagcgtatacaaaaggacattcaagctggtcatcagaagcaccgaggtcgataaagagttcaagcacttcatcaattacgtcatcaggtcttgcttccggacggtcaatcttattgatacatacgataacaggaagttccagctcgagagcttttctcagaacgaactttgtctgaggcatagcaccttcaaatgcatctacaacaagtacaacaccattcaccatcttaagaacacgttcaacttctccaccgaagtcagcatgtcccggtgtgtcaatgatattgatcttaacaccattataatgaacagcggtattcttggaaaggattgtgattccacgctcacgctcgatatcattagagtccatgacacgttcttctacttcctgattctcacggaatacaccactctgttttaaaagctcgtcaaccagagttgtcttaccatggtcaacatgggcgataattgcaacatttctcacatcttcacgttttgttttcataatctaaacactcttccttattataaaaaaatatttatctgtaacataacttcattattttatcacaaaaaatgaaatttacaagaaaaagtttgaattcgattttaagtacgaaaaaggtcgaatgttttttctgtaaaaaatagttctatttcattacaataagacatacattaggtaatgacttaaaataccagccagaggaagggagaattataaattatgtcagataagattattgaaaacaaccaggtgacagttattggagaggtggtatcagagtttacatacagccatgaggtctttggagaaggtttctatatggtagaacttcttgtaaagcggttaagtaactcttgtgaccggattccggtcatgatatcagaacgtctcattgacgtaacacaggattgccgtggagaatatttaatggtgtctggtcagttcagatcctataatcgtcatgaggagacaaaaaacagactggttctttctgtgtttgcgagagaaatagaatttatcgaggaagaaccggatggagcaagaacaaatcatatacttcttgaaggatatatgtgtaagcgtccggtctacagaaaaacacctcttggaagagaaattgcagatattctgctggcagtgaacagaccgtatggtaaatctgattatattccatgtatctgctgggggagaaatgcaagatatgcttcaaactttgatgtaggggaacatgtcagaatattcggaagaatccaaagcagagagtatgtgaagaaattgtcagagacacaaacagagacaagaatcgcatatgaggtctccgtcagtaaactggagtgtgtggaagaattctaagggtggattgtttcattatttaaaactttgtgaaaaggatatcatatattgagataacaactcaaatgtgatattcttttttatatgatatttcggaaaataagagtgtgatgaaagaaaaaacaggtaatgctgatagacagtagttctgaaaaatcatggaatacttgaggtttcatacaggaggaagatacagatggttaagatattaatgcacggatgcaatggaaaaatgggacgcatgatcacagaaattgtgaagaatgaagaagatgcagtgattgcggcaggcgtcgacaagttcacaggaattccaaatgattatccggtatttgaagagattacacagtgtgatgtggatgtagatgtagtgattgatttttccaatgcgggagcagtggatgaattgttagattactgtgtgaagaagagtcttccggttgttctttgtacaacagggctttcagacgaacagttaaagaaggtagatgagtgttctgagaagattgcagttcttaagtctgcgaatatgtcaatgggaatcaacctgttactgaaacttttgaaagatgctgccaaagtacttgcaccggcaggctatgatattgaacttgttgagaaacaccataatcagaagctggatgcaccaagcggaacggcacttgcattggcagactctattaatgaagcaatgggaaatgaatacgagtatgtatatgacagaagtcaggtgagaaagaagcgagacgcaaaggaaattggtatttcagcagttcgtgcaggaacaatcgtaggagaacatgaggtgatttttgcaggaacagatgaagtgattgaatttaaacatactgcatattcaagaagcgtatttgccaaaggtgcagttgaggcaggaaagttccttgcgggacagccagccggcatgtatgacatgggggatgttattcagttttagtactggatgaataatagccggtaaaccggcgggaacaagatccggtaaatagatcccggtaaggggaagatttcgggtctggaggagattgtgtatgaaaaatatggaaaaccgttatttagacaggttgtcggatctttatccgacaattgcagctgcatctacggagattattaatctgcaggcaattttgaaccttccgaaggggacagagcattttctgacggatgtacatggagaagatgaagctttttctcatgttctgaggaatggatctggtgccgtgagaagcaagattgaagatgtttttggtaatacaatgagtgtaaaggacaaaaaagcactggcaacattgatttactatccgaaagcgaagatggaacaggtgaagcggacggagtcgaatatggatgactggtatcgagtgaatttgtatcgtctgatagaagtaagtaagcgtgcagcaagtaaatatacaagatctaaagtgagaaaatcactgccgaaggatttctcttatgtgatcgaagaattgattaccgagaaagcggaagtcagtgacaaagagtcctattataatgaaattatttctacaatcatcaggatcggacgggcagaagaatttattgcagcaatttcagaactgatccagcgtctggttgtggatcatctgcatattgtcggtgatatttatgacagaggaccgggaccgcatcttattatggataagctgctgaaatatcattctgttgatatccagtggggaaaccatgatgttgtatggatgggggcagcggccggacagttgggctgcattgcaaatgtgatccgtatctgcgccagatatggaaacctggatattatagaagatggttatggtattaacttgcttccactggctacatttgctatgaggatgtacaaggatgatccatgtacatgttttaaattgaaaggtactgacagaccggaatctgatgagatgcagatgaatctgagaatacataaagcgatttcaattattcagtttaaagtagaaggtcagattatagagaggcagaaaggattccatctggagaatcgtgcgttactgcataagattgattatcagaaaggtacgattaatctggaaggaaaagaatataagctcctggatgcaaatttcccgacaatagatccaaagaacccatataaactgacttctgaagaggaagaaattatggatcgtctggtgcatgcttttgtgggatgtgaaaaattgcaggaacatatgcgtttccttcttgcgaaaggtggtttgtataaggtatataacaataatctgttgtatcatggatgtgtaccgttagatgcgaaagggaacctgaaagaagtagaaattttcggaaagaaatatcgtggaaaggccttgtatgatgtgttggaaagttatgtgagaaaaggattttttgcattggatccaaaggagcgggaagatggaaaagatacaatgtggtatatctggttacatccggactcaccgttatttggaaagaacaagatggcgacctttgaaagatatttccttgcagagaaggaaacacatatagaaaagaaaaatccatactatgctctgcttgaaaatgagacagttgtggataatatcatgatagaatttggattggatccaaaagaggatacacacattgtaaatggccatgtgccggttaagagaaaagatggcgagagtccgatcaagtgtaatggtaaagtaatggttattgatgggggattttcaagagcatatcagaaagaaaccggaattgcaggatacacgctggtttataattcgtatggattacttctggtagcacatgaaccatttgagtctacagaagcagcaattaagaaggaaaatgacattcattcagagacggtagtagtgaccagagtgaacgagagacgtcttgttggtgacaccgacgctggaaggaaattaaaagaacagattaaagatcttgaatggttgctgtcgtcgtacagaaatggtcagattatagaaaaactgtaaataattgtttatgctgattatagagacgtagaaaaacatatttaggactgaagatagaaaggattactagaatggaaaaagacttaaatcttccggaaggaacagaagtaacagaaccgctgaaaatctatctgaatgagattggacagatccctttgctgtcagaagaagaggaaagagaccttgggtgtaaaagtgcttcaggagatgaggatgcaaggagaaagctggaagaggggaatctacgcctggtggtatctctcgcaaaacattatactggaagagggattacactcatggatctgatccaggagggaaatattggtctcatgcatgcggcagagaaatatgattatacaaaggaaaatcgattttccacatatgcatcctggtggatcaaagaagcaatgcagcgggcaatcgatcagcagtcacgagaaatccgtgtaccggttcatgttgcagagaatatgaagaaagtacagaaaatttcaaaagatcttcagcagaaatttggaagagaggctacaccggaagagatagcagcagagatgaaggataaatcaccggaatttgtaaaagagattttgtcatatcttcagaatccggtttcactggaaactccggtaggagaagatggggagaataatcttggtgacatggttgaagataaggatgcaacgacgccggaagatgctatgaatcagcttgtgcaaaaagaagaagtacaggaattgttagagtctcttaatgacagagaacgtcaggtgatccgcttgagatttggtctggaagatggaaaaacacatacgttggaagaaatcggtgatgaactgaatgtgacaagagaacgcgtacgtcagattgaagccagagcgatggagaaacttcgcagcaaagcgacaaaactgtaaaaaatttcttttgaataaatattgaaaaattgcagatagtaaagacacaatatttatttgaaaggaagacaaaaaatgaggagaataagaaaattgcttgtctgtgtgatgtgcgtactgatgctttgcagtctcgctggttgtggaaacaacacaggaacagcgaatgacaatctcaatgatgcgacatccggtgaaaaccatgatggaagtggagaaaatggtaataataccggaaataatgcgggagaccagaatggagatagtatcctagatgacgcggttgacgatgtaacggatggcgtggatgatgttacagacgatatcacaaatggtgtcgatgatgcagccgatgatctgacgcaggagaatggcgtgcagaacaagatgcagaataacgagtgatcaatatgccgtaggccggaaacggaactgcggcatttttctaaaagaaggagagacaggatgagattcagaccatgtattgatatacataatggaaaagtgaaacagattgtcggaggcagtctgaaagatgaaggaaatcaggccagcacaaactttacgtcagaactggatgcagcatggtatgcaagacagtatcagaaagatcacctgaaaagcggccatataattcttttaaatccagttggatcagaatactacgaggcgacgaaaaagcaggcgatgggagctctggcggcatacccgggtggaatgcagatcggtggagggattacagctgaaaatgtaaaagagtacctggacgccggagcaagtcatgtgatcgtgacttcatatgtgtttcaagacgggatttttcatgaagagagactgcagaaattagtaaatgcagttggcaaagaacatgtggttttagatcttagctgcagaagaaaagacggtaaattttacgtggttactgatcgctggcagaaattcacagaacttgcgctgtctcacgaagtgttagatcagctttcagaatactgcgatgaatttttgatccatggcgtagatgtagagggtaaaggcgccggaatggaaacggaattagtaagaatgcttggaagctgggaaggaatcccaatcacatatgccggtggaatcggatcgctggaagatttggaaagattccgaaaagagagtggcggaaaggtcgattttacaattggaagtgctcttgatctgtttggagggaaaatcccatatgcagaagtttgtaaatccgcagaatgttaacactctatgaagttgttgaattcgcaggcggatagtgatagaatgtagaacagagtggaatttcagaccaaaatcaaaattcagagaaggagtaattgcggaaatatgaatattatagaaaagattttcggaactcacagtgagaatgagctgaaacgaatttatccgatcgtagaccgcatcgaggcactggggccggagatggaggcactttcagacgaagaacttcgaggaaagacaaaagaatttaaagaacgattgaaagaaggagagactctggatgatattcttccagaagcatatgctgtagtaagagaaggtgcttacagaagtcttggaatgcgccattatagagtacagttgattggtggtatcatcctgcatcagggacgtatcgcagagatgagaacaggtgaaggtaagactcttgtgtctacactccctgcatacctgaatgccctggatggaaaaggcgttcacattgtcacagttaatgactatctggcgaaacgtgatgctgagtggatgggaaaagtacatgagtttttaggactcaaagtcggtgttgttctcaatgagatgaacaatgacgagagacgagaggcttataattgcgatattacttatgtaacgaataatgaacttggatttgattatctgagagataacatggttatctataaagaacagctggttcagagaggattgcattatgcagttatcgatgaggtcgattccgttttgattgatgaggccagaacacctttgatcatttccggacagagtggaaagtctacagctctgtatgaagcctgtgatgttcttgcaaaacagctggaacgcggtgaggcaagcggtgagttttccaagatgaatgccatcatgggagaagaaatcgaagagactggtgatttcattgttgatgagaaagagaagacagttaacctgacagaagatggtgtgaagaaagtagagaagttcttccacatcgaaaaccttgctgatccggagaatctggaaatccagcataatattatccttgcgctcagagcacacaatctgatgttccgtgatcaggattatgttgtaactccggatggtgaagttatgatcgtcgatgagtttacaggacgtatcatgccgggacgtcgttactctgatggtctgcatcaggcaattgaggcgaaggaacatgtgaaggtaagaagagagagtaagactctggcaacaatcacattccagaacctgtttaataagtatgacaagaagagtggtatgacaggtactgcgatcacagaggaaaaagagttccgtgatatttatggaatggacgttgttgaaattccgacaaacaagccggtacagagagtggatcttgaggatgctgtttataagacaaagaaagaaaaatacgaagcagttgtagaagctgtgaaagaagcgcatgcaacaggacagccggtgctggtaggtacaattacgattgaagtatccgaacttctcagcaagatgctaaagaaagagggaatcaagcacaatgtattgaatgcaaagtatcatgagcaggaggctgcaatcgtagccgatgccggacttcatggagctgtaacaatcgcaaccaatatggctggtcgtggtactgatatcaaactggatgatgatgcgcgtgcggcaggtggtctgaaaattatcggtacagagagacatgaatcccgtcgtattgacaatcagctgcgtggacgttccggacgtcagggagatccaggagagtccagattctacatttctctggaagatgatctgatgcgattgttcggttcagaaagactgatgggaattttcaatacacttggtgtagaagacggtgagcagattgaacataagatgctttcaagtgcaattgagaaagcacagaagaagattgagagcaataactttggtattcgtaagaatctgttggagtacgatcaggtaatgaacgagcagagagagattatttacgaagagagacgccgtgttcttgacggagaaagcatgcgtgatacaatctacagcatgattacagaatatgtggaaaatatgacagatcgttttgcttctacagaggcagatccggaagagtgggatatcaagggattggatgtaaatcttcacaatgtgattccgcagcttcagctcccatctgagaaggaatgccagagtatgagtcagaaggagttaaagcatcttctgaaagaacgtggagtgaaggcttatgagaacaaagaagcagagttcccggaggcagagcagcttcgtgaagttgagcgtgttgtacttctgaaagtgattgatgcaagatggatggatcatatcgatgatatggatcagctgcgtcagggaatcggtcttcaggcttatggacagagagatccactggtagagtacaagatgacaggatatgagatgttcggtgaaatgacaaatgcaatcgctgaaaacacgatccgtacattattccacattaaggttgagcagaaagtggagagagaagaggttgcaaaagtaaccggaacaaacaaagatgacagcgcagtccgtgcaccgaaaaaacgcgaggagaagaagatttatccaaacgatccatgcccatgcggaagtggaaagaagtacaaacagtgctgtggaagaaagattaaataatctgtaactgttcagagccaagcaaaatttcataaaacaggtgtaaaatgcttgcatttttaagactgtttttgaaattttatttggcggatacgccacaccgacgaaatgcgtagcattttggaggttggctctgaacagttacaataatttaaagtatatatatgaaagaggtgattaaggtggttttactggatgaactgaagtcaagactgactgcatatgaagaaccgctgaaagatttgagggattcactttgacctcgcttcaaagaagcttaggatcgaagaattagaaaagagactggaggaaccaggattctgggatgacccggagatttcccagcatgtaatgaaagaattgaaaggccttcaggattctgtaaaagagattgaaaaattatttacagattatgaagatatgcttcttctgattgaaatgagtgcaggagaagacgaggagcaggaagccgcagaagagattgaagaggaacttggaacatttgaggaagtctttgagaaactgcgaatcagcacacttctgatcggaccgtatgatgcagataatgcaatcgtgacacttcatgcaggtgcaggcggtacagaggcaatggactggacaagcatgctctatcgtatgtacagccgctgggctgaaaagagaggatatgaagtcgaggtgctggactatctggaaggagatgtagcaggtatcaagggagttacttttgaggtcaagggagaaaacgcttatggttatctccgttccgagaaaggtgtacatcgtctggtacgtatttctccatttaatgcaaatggaaagcgacagacgtcatttgcatcctgtgatgtaattccggatattgaagaagatatcgatatcgagatcaatgacgatgatatccgtgtcgatacttatcgttccagtggtgccggtggacagcacatcaataagacgtcatctgcaatccgaatcacacatcttccgacaggaattgtggttcagtgtcagaatgaacgttcccagcacatgaataaagataaggcaatgcagatgttgaaatccaaactgtatgtactcaaacagcaggaacaggcagagaagatgtcagacatccgcggagaggttagagatattaatttcggaaatcagatccgttcttatgtcatgcagccatatacacttgtcaaggatcacagaacaaacgcagaaatcagcaatgtaggtgcagtaatggatggaaatattgatccttttattaacgcatatttgagcatggatgcagaagcacagaaaggaaaaaaagcagaatgataaatgtagcagtaatgggatacggtacagtaggatcaggagttgtagaggtccttagaaccaatggtgaactcatcaatgaaagagctcaggatgtgataaatgtaaaatacgttctggatctcagagattttccgggcgatccggtagaagagattctgacacatgattttgagacaatcgtaaatgatgcagaagtagatattgttgttgagacaatgggaggcgtagagccggcatatacatttgtaaaacgttgtctggaagcaggtaaaaacgtcgctacatccaacaaagctctggtagcaaaacatggagcagaacttcttgagattgctcgtaacagaagtatcaattttatgtttgaagcaagtgttggtgggggtatcccaatcattcgtgcactgaattcctctctgacagcagatagaatcgacgaagtgacgggaattctgaatggaacaacaaactatatgctgacaaagatgttctttgagagtgctgattatgatgaggtgctcaaagaggcgcaggagaaaggatacgcggagcgtaatccggaagcagatgtcgagggacatgatgcgtgtagaaagattgcgattctgacatccctgatcgcgggacaacatgtggatttcgagacaatccatacagaaggaatcacaaagatcacaacggaagatatgaaatatgctaagaagatggatatggcgattaaactactcgcgtccagcaagagagaaggagactccttctcagcaatcgttgcaccgatgcttctttccaagaatcatccgctgtgtaatgtgaataatgtatttaatgcagtttttgttcgtggaaatatgcttggtgatgcaatgttctacggaagtggagcaggtaagctcccgacagcaagtgctgtagttgcagatgttgtagatgccgcaaagcaccttcacagaactgttgtaacaagatgggagagtaagacactcgaacttgttccgaatgcggatgcgaagagaagattcttcgtcagaattaatggagaagaatctgcactcaaatcccgtgtggacgaagtgttcggacaagctgaagttgtcaaagtagatgatgtcaagggagaatttgctgttatcacgggtgagatgaccgaggcggagtatgcgcagaaagcagaagagatgccagaagttgtgaagatgatccgtatggcagattaatttgtatttgctacattggattctgaaagatgaaaataaaaaaggaaaactatcgactacgataataatacaaacaagggttgaattattgtagacgatagttttccttttataatttgctcagtgtactgttatggtacgcagaactgaaggtgacgtcctttcccagccattgaggtgtgggataggtgttagctgtttcttcgtctggaaattcaatttcggcgagaatcagtggagcaaggtcatcatggaagatatctaattcaagaaaaagcggagtggaacagaaagctgcattttcaggacagatacaattcatgggaatgatgtagcgtgttttatgaatgatgcgcccgtcaactttctctctcagatgatcataactttcctttgtgagaggaagattatattcttcacgagccataagccctttagacttgtaggtgagaatataatcgtcatcttctctgcgtatccttacgacaggagcagtgcataagtagccttgctccagttctttgtgaggataatcgaaaggagaaaatggcaactcctcaagtttttgtattaaaaatttgcgttctatttccatagctaaatattcctcctgatgtcgaatgtttatactataataatatgaagtgagtgtcaaaagtaaattttgccactcactgatgtaaccggattgctccattgctatgcaattcccacaatcctcgaacacctcaaacttccataaaatggcgtgttcacaccattttattccgttttcggtgttcggcgtgtcaataagtataaattgcttatttgtgcgagcacaaacgcaatttatacttttgacacttacatcataatacgtgaaatataaaaaggcaatggtgagatgagtactatcttgacttgacgaacaacttatctacgcagtaaaataaaatcgttgttgagatatcatcagaaagcgaggaagcattggatgaaaaaagtagttgtatttttagcagacggttttgaagaagtagaaggtttaactgtagtggatctgttaagaagagcaggagcggttgtagagacagtttctgttatgggaaaactgcagattgacggagcacatggaatacaggtggaagcggatgaattgtttgagaaagcattttttgatgacgcagaacttcttgtacttccgggaggtatgccgggaacattgcatctgaaagcgcataaaggattggcagatctgctttgtgaattcaacgaaaatggaagggaaattgcagcaatctgtgctgctccgacagtacttggagcactgggactgttgaaggagaaagcagcatgctgttatccggggatggaagaacagctgaattgtaaagaagcaaagttctgttcctttgttacagatggaaatatcacaacaagccgtggtgtgggaacagcgataccattcgcgttggaactgatccgtcagctttttggcaatgagaaagcttctgaaatagcagaatctattgtatataaggaataaaattagaaaaagtagtcagaaaaatgtaaaaaaacatgtaaaagatataggaaagtggaaaaaacactggaaatatgagactttatatgctatactgtctcaatgactgcgaatgtatacttttaagaaattaattcgttcgataagtaaagaatttgcttataaacaaggaggaagaaaatgagtttacaggtagaaaaattagagcataatatggcaaagctgacaatcgaagtttcagctgaagaagtagagaaggcactgcaggcagcttacttaaaagagcgcagcaaaatcagccttccaggattccgtaaaggaaaagttccgcgtcagatgatcgagaagatgtacggaccggaagtattttatgatgaggcagcaaaccgcatgatctctgaagcatatgcaaaagcatatgatgagagtgaacttgagattgcttcccagccgacaattgatatcgttcagcttgagaagggaaaaccattcatcttcacagcagaagttgcagttaaaccggaagttaaacttggagagtacaaaggacttaaagttgacaaatactctacaagagtaacacagaaggaagttgacgaggaaattgagaaagttcgtgaacagcacgcaagaatcgttgaggttacagacagagctgtagcagataaagatgatgtcacacttgattttgaaggattcgttgatggtgttgcattcgaaggcggaaaaggtgagaactatccgctgacaatcggatccggatcttttattccgggatttgaggagcagctgatcggagctgaacttgagaaagaagtagaagttaaggttacattcccagaagattatcactcagaagatctgaagggtaaagaagctgtattcaaatgtacagtacatgcaatcagagccaaagagcttccggaagtagatgatgagttcgcatctgacgtttccgagaaggctgagacacttgatgcttacagagcagaagtaaaggctcagatcaaagagcgtaaagagaacgaaggaaaggctaagaaagaagatcaggctgtagagcaggcagttgctaatgcagagatcgatcttccagaaccaatggttgaccttcaggctaagcagatggctgatgattttgcacgccgcattatgcagcagggactcagcgtagagcagtacttccagttcacaggtctctcagaagagaagatgatggaagagcttaagccacaggctgagaagagaatcagaacaagacttgttcttgaagcaatcgtagcagcagagaatattgaagtatctgatgagcgtcttgatgaagagttagctaagatggctgagtcttacaagatggaagttgagaagctgaaagagttcatgggtgagaacgagaagaagcagatgaaagaggatattgcagtacaggatgcagttactctgatcgttgatgcatctgtagaaggctaatcatttattggatttcttgagagggtgcgcctgtatatcaggtgtgccttttctctttagcgacaatcatatagaaaaggaaggatagcatatgagtttagtaccttatgtcattgagcagacaagccgcggagagcgttcctatgatatttattcaagacttttaaaggagcgtatcattttcctcggagaagaagtaaatgatgtgtcagcaagcgtgatcgttgcacagcttctgttcttggaggcagacgatccggataaggatatccagctgtatattaacagcccgggaggatctgtaacagcaggtctggcaatctacgatacaatgcagtacatcaagtgtgatgtttcaacagtatgtatcggtatggcagccagcatgggcgcattcctgctttccggtggaaagaaaggaaagagatttgcccttccaaatgctgaaatcatgattcatcagccatccggtggtgcacagggacaggcaacagagattcagattgcagcagaacatattcttcgtacaaagaagaaattgaatgagatcctggcagcaaatacaggaaagccgctggaagtgatccagcaggatacagagcgtgacaatttcatgtctgcagaagaggcgaaagagtacggtctgatcgacgaagtaatagtaaaccattaattggttattgaggtgacagaatatggcaggaaaaaagactgaggatatcgtaagatgctcgttttgtaataagacacagtcccaggttcgtaagatgatcgcaggaccgaacggaacctatatctgtgatgactgtgttgctatttgtaccgagattattgaggaagaattagattttaatgacagagctgcacttgacgatattaatctcctgacaccggaagagatgaaagcttttttggacgaatatgtgattggacaggatgaggcgaagaaagttctttctgttgcagtttacaatcattataagagaattctggcagaacaggatcttggagtagaacttcagaagagtaatatcctgatgcttggaccaacaggatgtggtaagacacttctggcacagacacttgcgaaagtgctgaatgttccatttgcaatcgcagatgctacagcactgacagaggcaggatatgtaggagaggacgttgaaaatattctccttaaggtgattcaggcagcagacggagacatcgagcgtgcagaacacggaatcatttacattgatgagattgataagatcacaagaaaatcagaaaatccatccattacacgagatgtttccggagaaggtgttcagcaggcacttttgaaaatcatcgaaggaacagttgcgtctgttccaccgcagggcggaagaaagcatccacatcaggagttgatccagattgatacaacgaacatcttgtttatctgtggtggtgcttttgaaggaatcgataagatcattgagacgagaatcgatagaaaatcaatcggattcaatgcagagatcgcatcaaaacatgagtacgatatggatgtacttcttcaggaagcacttccacaggatcttgtaaagtttggtttgattcctgagctggtcggaagacttccggtgacagtatcattggatcttctggataaggatgcattgatacgcattcttacagagccaaaaagtgcgatcgtaaaacagtatcagaagcttctggagctggatggcgtgaagcttgaatttgataaagatgctctgttagaaatagcagagacaacattgaagcgtaagacaggtgcgagaggtctccgtgcgatcatggagaatatcatgatggatacgatgtttacagtaccgtcagataagacaatcaaggaatgccgcattacgaaggaagcggttcttggattggaagaaccgaagtatactcgtgatggtgaggatagaaaatcattcctgacatctgagagcaaatagtaactggatacaggaatcctgcaaacagttgcggagtataaaacgaggcgggagtgatgggatatccatcctacccgccttttctaacgaggaggaattgaattggacaacgagacaagaagtctccctatggttgccttaagaggattaacaatcatgccggagatgatcgttcattttgatgtgagcagagaacgctccatcgctgcaattcaacaggcaatggttgaagagcaggagatatttctggttgcccagaaatcaatagagacagagaaccccggacaggacgatgtctatgagattggaacagttgcatctgtgaagcagctgatcaagctgtcaaagaaagtcgtaagggttctcgtggaaggaaagaaccgtgcggttcttaagaaaattgaagagacagatccttatcttcgtgcagaagtagaagttctggaagaacaggagatcacgattccggatgatctgaatgcggaagcaatgatgcgcggattgaaggaaattattacagaatatgcagcaaagaatggaaagatttccaaagaatctgttgcggaaattctcgatattactgatttaaaacgtctggtaaatgaagtggctgcgaatattccattgaagtacaaggatcagcaggaacttctggaagagctggatttctggagtagatatgagaaattatcattgaagcttgtgaatgaaatgcagattatggagatcaaagaagaacttcaaaggaaagtaaaaaataaagtagataagcatcaaaaagaatatcttttaagagaacagctgaaggtgattcgcgaggaattaggtgaggatactacattttcagatgcagatgagttcgaagaagcatgtagcaaattagatgcaccggaagaagtaaaagaaaagctccataaggaaattggacggtttaagaacacgatcggttctcaggcagaaaatggagtaatccgtacttatattgagacaatcctggagatgccgtggaataaacgtgccgaagataatacagatattaactatgcgaaagaagttttagaggcagatcattatggattggaacaggtgaaagaaagaatcctggaatttctggctgtcagaacactgacacagaagggagagagcccgattctttgtctggtgggacctccgggaacaggtaaaacttctattgcgaagtctttggctcgttctcttaagaaaccgtttgtgcgcatttctttaggaggagtacgtgacgaagctgagattcgcggtcaccgcaagacttatgtaggggcaatgcctggaagaattgcaaatggaatccgtgcagcaggtgtgaagaatccggtccttcttctcgacgaaatcgataaagtaagcacggactataaaggggatacattctctgcacttttggaagtactggatagtgagcagaacagtaagttccgcgatcattatctggaagtgccgctggatctgtcagaggttacatttatcacaacagcgaataccttacagacgattccaagaccacttttggacagaatggagatcatagagatcacaagttatacagaaaacgagaaacttcatattgcaatagaacatctgattccaaagcagctggaaaagcatgggattacagccgaacagctcagctttagcaagaaagcaatttggaagatcgcacataactatacgaaagaagcaggtgttcgtcagttagaacgtgaaatcggaaatatttgccgtaaggcggcgaaagagcttcttacaaccgagaaagagaagattactgtgacagataggaatcttcataaattccttggaaaagagaaatactcttatcagatggcaaatgcagcaccggaggtcggtatcgtgcgtggacttgcatggacaagtgtcggaggagatacgcttcagattgaggtaaatgtaatgccgggcaagggagaaatcatgctgacaggacagcttggagatgtaatgaaagagtccgcccgtgccggaatcagttatattcgatctgtaagcaaaaaatatgcaatcgcagaagatttcttcgagaagcatgatattcatgtgcacattccggaaggtgcagttccgaaagacggaccatcagccggaatcacaatggcaacagcaatgctttctgctgtgacaggcaagaaagttcgcgcagatcttgcaatgacaggagaaatcaccttgagaggtcgtgtgcttccaatcggaggattgaaagaaaaacttcttgctgctaagaatgcaggaatacagaccgtgcttattccaaaagagaacacagcagatgtggaagaactttcttctgaaattacaaaaggattggaaatcattccggttgagacaatggaagaagtcttaaagaaagcactgactagataaaaagattgcttctgacagcagattgcaataaaatagaatgaaaggaggagtaaacgacatggtcattaaaaatataaatttggaaacagtttgtggaatcacaagcgttcttccggaaaacgataagcctgagatcgcatttgcgggaaaatcaaatgtaggaaaatcatcactgattaatgcactgatgaaccgcaagtcttatgcaagaatttcagcaacaccgggaaagacacagacaatcaatttctatacgattaatgaggaaatgtatctggtcgatctcccagggtatggatacgcaaaggtttctgagcaggaaaagattcagtggggaaaactgatcgagcgttatctgcatacgtcaaaacagcttaaggcagtattccttttgatcgatatccgtcatgatccatctgcgaatgataaaatgatgtatcagtggatcctggatcagggatatcagccaatcatcatcgcaacaaagcttgataagattaaacgcagtcaggtacagaagcatattaaaatgctgaagacaggtctgcagcttgttcctggaacaaaagtaattccattctcatcccagacaaaacagggaagagatgagatttgggaattgattgagacagaatatctcggatatggaaatgacgagggggcagaggatgacaaataagcgcccatactggcaagttgccgtaagcttgcttttcagcatagtagcaacagtcggatttgtactgatcggatggaaattacttggatttctcatgccgtttgtggttggatggatcattgcatctatcgccacaccggttgttaactggttagaaaaacgtttgaagatcagaaaaaaattaggctccgcattgattattatcggagtcctggcgttgatggggacgctgggctactttgctgtcagttggctggtttcagaagtcagcagtctgatcaaagactttccggaaatgtatgtgcagctcgaaaaaggactccatcaaattggaatttctatgtctggaatttttagcaaactgccggatggaatccagaatggatggacgacaactgttgcgaatctggatgacacgatgggaagtctgatgtcaaaaatcagtgagccaacagtaagtgccgcaggaaatatcgcaaagcgtgtgccgagttatctggtatcaacaatcgttgcggttatgtcttcctatttctttatctcagagcgagaagaagttgtgacctgggtcaaacagattgcgccaaagtcagtaactgaacgaatgatcatggtgatagataacctgaaatatgcggttggtggatatttcaaggcacagtttaagatcatgggaattgtatttttgattttggctgtaggacttggatttttgagagtccattactttgtattgtctgcatttttgatcgcatttctagatttcctaccattttttggaacaggaactgcgatgattccatgggctatatatgcagtctttatgggagattataaacgtgcgattatgcttgttgtgatctatgcaattacgcaaatcgtcagacagctgatccagccgaagcttgtcggagacagtgtcggattgaatccgctggttacactgcttttgatttatattggatatcgaattggtggtgtgatctggatgatccttgctgttccggttggtatggtcattataaatatgtgtcaggccggtgcgtttgattatatttttgatgatatgaagacgctgattgtcggaatcttgaaattaagagacgaagagtagtgtagttaagaaacaagaaagtaattgaaaggagaaaaatatatgagcaattatgatgtaattattatcggtgcaggacctgggggaatctttgcagcttatgagctggcagagaaagcgccggaattgaaggtggcggtatttgaagccggcaatccactggagaagagaaaatgcccaatcgatggaaagaagattaagagctgtgtgaactgcaagacatgcgcgattatgagtggattcggtggagcaggagcattttcagatggaaaatacaatatcacaaataattttggtggaacattgtatgagtatatcggtaaagagacagcaattgagctgatgaattacgtagatgagatcaatgtgaaatttggtggtgagggtacaaaaatgtattccacatcaggaacacatattaagaaactctgtatgcagaataagctgaatcttttggatgcatctgttcgtcatcttggaacagatatcaactatgttgttcttgagaatctctatgcaaagttgaaagatactgtagagttccgttttaactgtcatgtagatgatgtggaagcgattgacggcggatatcgcgtgattacaaaagatggtgtagatgaatgtaagaaatgtatcgtttctgtgggaagaagcggaagtaaatggatggaaaaagtatgtgaaaatctcgatatcacaacaaaatccaatcgtgtagatatcggagtccgtgtggaacttccagcagttattttctcacatcttacagatgaactgtatgaaagcaagattgtctacagaacagagaagtttgaagataaagtcagaacattctgtatgaatccgaatggaatcgttgtaaatgagaatacaaacggaatcgttacagtaaacggacatagctatgaagatccggcgaagcagacagagaatacaaactttgcgcttcttgtggagaaacatttttcagagccgttcaaagacagtaatggatatggtgaaagtattgcacgcctgtctaatatgcttggaggtggcgttcttgtacagcgttttggtgatctgatccgaggaagaagaagtacaccggcacgtattgcagagagttttctgacaccgacactttccgcagaaccgggagatttgagccttgtattgccgaaacgtattcttgatggaatcattgagatgatctacgctttggataagatcgcacctggaacagcaaatgatgatacactgctctatggtgtagaagttaagttctacaatatggaagtgaaactggatgaacatcttgaaacaaaacacaagggcctgtatgtgattggagacggaagtggagtgacacattcattgtcccacgcatcagcaagtggtgtgttcgtagcaagagagattgcagaagaagtgtaaattgatagaagttaatagttaaaataaagggaagtttttcatttgcagaaattacatgaagtgtgtttgtgtattgcaggtgaaaaacttcccttttttcttatgtataaaaaagaaacttgagtttttgttgtttttacaaataaaccagttggattttgttgattcttaattaaagcgtgttgagatttattggaatctccttgacagaaaggcatatagatagtattatttatagtaagagagtttatagctgagactgggttactgttcactcccgtgtcaatcacttcgctgattgacacggaggatgcatgttttggcttgaatgcatctcgccccatcgccaaaggcgatttaaaatggcgagatacgttgctggtcacatcgtgtgaacagtaacgagactggctgtgaacagagaatgttagtggattaacatacaggattgtatgaatgagaattacagaatctatgtgaaagagaggaactgacagatggcgaatgatcacggagaacagattagaattgtacaggaaacagttgcaggtaaggagattacatttgcacatgtaatgggaggtccggctccgattatttatcagaaactcggattaaatccacatctggattatcgttcttctgcaattggaattatgaatatgactccaccggagtcagcagttatcgcatctgatattgcagtgaaaagcggtaatgtttatcttggattcgcagaccgttttacaggcacactgattattacaggagagatttctgatgttacatctgcattgacagaagttgtggattatttcagagattctcttggttatgtagtctgtgatattacaaaacgataggaagtgcgcttatggaacgggaacgtataacgagagaagagctcatggagcgtctgtttcatgatgactatgagaatctgaaaggaaagaagcttcgtatgactcgtgtgcgcgtgccggggaaggaagtctgcatggcgcatattatcagtagatcagatgaggttatttaccagaatctgggattacatattggaactcatgaaggtgaggatcacacaggagagtctatcggacttctgcgttttacaccgtgggaagcagttgtggttgctgcagatgtagcattcaagagcgcagatgttgagattggatttatggacagattctgcgggacactaattctgaccggcggattgacacaggtacagacagcggtggaagaagtagttcgattttttaatgagagacttggctttgcagtgtgcgaggttcatagaagttaagaagacagaggcgtaacaggatgaaaaagatatttttgatggggagaagtgaagcggggaagacttcactgacgcaggctcttaagggagaagaactgcattatgtgaagacacagtatacgaatacagaagatgatacgatcgactctccgggagagtatgcagagtctaagcatttcagtgttggacttgcctgtttttcatttgaggcagacgtgattgctatggtgcaggctgcagatgaaccgttcaatctgttcggacctggaagcagatgttttatccaacgtccattgatcggaatcattacaaagattgattcaccgtacgcaaatgttgatatggtgagactttggatgaagaatgccggatgtgagcgcattttcgaagtaaataataagacgcgggaaggtatcaaagagctcatagattatctgaatgagcctgtggaaatactgacattggatcgtgccagatataaacagtcattgggattgaatgactgggatccactaccggaaggtgtagagtatccggatggcatgtagatatcaaaagattaaggtgactgttcagagccaaccttcaaaatgctacgcattttgaaggtgtggcgtatccgccaaataaaatttcaaaaacagtcttaaaaatgcaagcattttacatctttttttgaaattttgcttggctctgaacagttacagattaagaaaaattaagaaagatatccctcttgagatatttctggaagatagaatatgctataatgattatgtagcaatcagttcaatcaacagaatgacatcaggagggatttttatgttatggacaagaagtgaattaaagggaagagcaaagttcctgttgaaacagaattattggtattctgttcttgcagcattgatttatacgtttcttttgggaaatggatttacgcattcttataatatactaaaaaataagaatagtgaggtggaaacttcgatacaaggttttcatccgattctaatgtttgggattgcagcaactgtagcagttgtggttgtaatttcatttattgtatatctggctattgcctatttcctatggaatccaatgactgtcggctgttgtaaatttttcaaaaatggaagagacggaagacaggatgtgaaagatattttccgtatggtaagagattgcaataagacagtacgtatgacaatgcttctgaagacaatttatcttacattgtggtcactgttatttattgttcccggtgtgatcaaaggatatgaatatgcaatggtaccgtatcttctgcttgaccatccggagatgagcagacaggagatttttgcggagagcaaacgaatgatgatggggaataaatgggatgcgtttgtgctggatctttcctttatcggctggcatttgctgggggcatgtacgtttgggatcttaacttttctttatgtaaatccgtatcagtattatacagaggcagagttgtatcatgtgctgagagatagaatgtgaacatagatttatattatgaaacttagagtaaaaaagctcacagctggttgtagacgatcagctgtgagcttttcttttgcaaaataaaaatagaagacaactcaatattttctattgacattaaaaaccaatgtgataaacttgtttacgcaggaactgttcattgatgaacagttcattaacaaacagttcctgcatgtgaagatggaaaggaggattacaattttgtgtgaagaacattttcatatcgctccacaggtacataaaatggatcgttccatttcaaaattacttgaggcgagagtaaaagcggaagggttggatgaaggaacccttatgcatggatggattttgcgttatctctatgaacatcaggatgcagagatttatcagaaagacatagagaagtatttcggaatctgccgttcgggagtaacgaatatcattcaggctttagagaagaaaggacttgtctatcgtgcttcggtcgcgagtgatgcaaggctgaaaaaggttatgctgacagaggcaggacgcgaaagccacgaaaagcttggagagattttcaagcgaatggacgcagaactggaagaaggaattaccgaagaagaattacaggcatttttgagagtgactcataaggtccatctcaatctaagaaaaatgagaggagagaattcatgattcgtactttattaaaagaagtaaaagagtataaggcagcatcgatcgcgacaccgattttcatgattcttgaagttctatttgagacattgatcccatttttaatggcatcgattattgataaaggagttaatacgggtgatatctatcacatttacaaagtgggtggaatcatgatcgtagcagcatttttgggtcttcttgccggaatggcaggaggacgttatggagcaaaggcttctacaggcttcgcaaagaatttgagaaatgcaatgtttgatcggattcagacatattcgtttgcaaatattgatcatttcagtacagcaggactggtaacgcgtctgacaacagatgtaacaaatgtgcagaatgcgtatcagatgatgttacgcatgatgatgagagcaccggcaagtatggtctgtgcgatggtgatggcatttgcgatcaatgcaaggctggcaagtatttatcttgtggcagtcttgattcttggaattattttgttttttattatccgccatgcaactgcatattttcagcaggcgtttccaaaatatgacgcattgaatgagtctgttcaggaaaatgtatctgcaatccgtgttgtcaaagcgtatatacgagaggacgaggagacaagcaaattcaaacgtgcaagtaagaatatttatgatatttttgtaaaagcagagaagaatgttatctggaatgcgccaatcatgatgtttacagtttacacctgtatcattttgatcagctggttcggtgcgaagatgattgttgtggattctcttacaaccggggaactgatgagtcttcttgcttattgtatgaatattcttatgagtctgatgatgctttcgatggttttcgttatgatttccatgagtatggcaagtatgcgtcgtatcgcggaagtgctggaagagagaacagatattcacaatccggagaatccggtatacgaagtcgcagatggaagcatcacatttaaaaatgtagacttttcttataagaaagacagtgcagagaaggtactcaaagacatcaatctggaaattcattccggagaaacgattggaattatcggaggaaccggaagtgcaaagacaagtctggtcaatctgatcagtcgtctgtatgatgtgacggacggagagattctggttggtggaaaaaatgtaaaagaatatgatcttgaggtgcttcgtaatcaggtgtctgtagtgcttcagaaaaatgtcttatttacaggaagtattttagacaatctccgttggggagataaagaagcgacagatgaagagtgtatccaggcatgtaaactggcctgtgcagatgaatttatcgagcgcttcccggataaatataatacgcatattgaacagggcggaaacaatgtgtccggtggtcagaagcagagactctgtattgcaagagcattgctaaagaagccgaagatcctgattcttgatgacagtacaagtgctgttgatactgcaacagatgcgaagatccgacgtgcattccgtgaagaaattccagatacaacaaagctgatcattgcacagcgtgtatccagtgttcaggatgcagaccgtattattgtgatggatgaaggaaagattcatggattcggaacacatgatgaactgcttgcgtcagatgagatttatcgcgaggtatatgagtctcagacacagggaggcggagattttgatgaaaatggaggtgaagcataatgcgcggaccaatgggaaaaccaaagaatagagtggaaaatcctggaaaattactgaaacgtctgatggattatattttccgagattataaatttcattgcattatagtattcatccttatttttgtaggagttattgcaaatgttcagggaacgatgttcacaagagatttgattgataaatatattacaccgttcttgttgtccggtgatacactgaactttacaccacttgcacatgcaatcggaaaagttgcctgcttttatggagtcggaatcgtggcaacgtatgcttacaaccgaattatgatcaatgtgacacagggaatgatgatgaacatgagaaatgatctgttcagtcacatggagaaacttccaatcaaatatttcgacacacatgcacatggcgatattatgtcaatctacacgaatgacattgatacactcagacagatggtgagccagagtattccgcagattatcaacagtggattcacaattgtcagtgtatttatcagtatgctgatcttgaatattccactgacagcagtgacgatggttatggttgcgatcatgatctgggggacaaagaaagctgccggacagagtggaaaatatttccttgagcagcagaagaatcttggtaaggtcaacggatatattgaagaaatgatgaacggccagaaggttgtgaaggtattctgtcatgaagaagaaagtaagacagaattcaaaaagttgaatgaggacctgtttgtgagcgcagaccgtgcaaatacttatgcgaacttcctcggccctatgaatgcgcagattggaaatatcagttatgtaatgtgtgcgatcgttggaggtgcacttgctcttaaccatgtcggtggatttacattgggcggtctggcaagtttccttacatttaataaaagcttcagtatgccgatcaaccaggtgagccagcagctgaatgcgattgttatggcacttgcaggtgcggagcgtatctttacacttctggatgaaaaagtggaagtggatgaaggttatgttacattagttaatgcaaaagaagagaatggaaaactgacagaaagtgagaaacgtactggccgatgggcatggaaacatacacatcaggcagacggttctgttgattatgttgagctaaaaggaaatgttgtatttgacggagtagatttcggatacaatgatgacaaaatcgttcttcatgatgtgaaactatatgcagaaccggggcagaagattgctttcgtaggttcaacaggagccggtaagacgacaattacaaatctgatcaatcgattctacgatattcaggatggtaagatccgctatgacggaattaatattaacaagatcaagaaagcagaccttcgacattctcttggaatcgtattgcaggatacacatttgtttactggtacagtgaaagacaatattcgttttggaaagctggatgcaacagatgaagaaattgttgcggcagcaaaactggcgaatgcagatggatttatccgcagacttccggaagggtatgacacggtgatcaccggagatggagcaaacttaagtcagggacagcgacagcttcttgcgattgcccgtgcggcagtagcagacccaccggtattgattctggatgaggcaacgagttcaattgatactcgcacagagcgtattatccaggaaagtatggaccggctgatgcatggccgtacgacattcgtgattgcccaccgattgtcaacggtacgtaattccgattgtatcatggttttggaacagggaagaatcatcgagagaggtacacacgaccagttgattgaagagaaaggtaagtattatcagctgtatacaggaaatgcaatatcagcatagaagaaagtagagataaaaaagaactgaacccagatgattaatgtcaatgggttcagttctttttgaaatagaaatcaatgttcagtaaaatctaaagcttcatgtgcgagtttacggtcagcttcaccagcagaacggtatttcaaaagaaaattcacttcattttttgtaagaagaatgtcgttttcactattttcaattttaatacagaaatagttttttacttcaactgatgatggattctttgcattgcagtactgagtgataagcgagtcgacagaggtgtgatagatccaggatagttcagcaagaagttgaaggtttggttcacgtacgccggtttcataatttgaataagcctgatgagtgatatgcagcttttcgccgatctgagcctgtgtgtagttatattgctttctcaaacgccgtagattatccgcaagttgaatatttgccatagtttcacctccgtttctatcatccgttaaggttcaaggatgtcttttccctcaatgagatattcataagaaacgtcgaagatctcagttagagctttcaattctatgtctgtaacgtaacgtttgtttgtttctattcttgtaattacatttttgtccatatcatatccgcgcaattggagtttgtaagctaaaagtctctgtgacatatggcgttgccgacgaagttcaatgagccttttgctgatcagattcttctctccggtaataggtgttcgttttggcatagttctaatccctcctgcaaatagtgtgaacaggtttgtctcgttttttgcacttttaatgattttacatggaattgggtaaccagatggttggaataatgagacaaacggaaaataattgtatgatttgtaatgattgaactctgaagatagtgtataatgaattccaaacaatatagaaaatcaatgcaaaataagatgaagatttgttaaaaaagttcatggacttcatcacgttaaattgatacaatttatccacaggacaacagaaaggacattattattatggaaaaaggtacaatttttaaatttcataatgatcttgatacagatcagatcatcgcatcccagtatctgcttctgccgaacttagatgagatgaagagccatacatttgaatcattggatccggattttgcaaaaaaagtaaaaccgggagatttcgtagtcggaggagagaattttggttgtggatcctcaagagagcaggcaccgggtgtgctcaaagcacttggagtacaggctgtcattgcgaaatcatttgcaagaatcttctatagaaatgcaatcaatatcggacttccggtcattgtctgtaaggagcttccggatgaggtgaagacaggtgatacaatggaacttcgcatgtctgacggaacagctgaggcgaatggaaagacttattcctgtacaaagctgccggagtatatgcagaatattctgaatcagggtggactgatcgcttcactgaataaggaggactagaactatgggaatgacaatcgcagagaagatcatcgctgctgcagccggtgtggacagcgtaaaaccgggagatatccatacagtaacattggacagaatgatgagtaatgatggaacgacacatcttactgtggatatgtataataacaaattaaagaatcctcgtattgcagatccgaaaaaactggtattcattgtggatcataatgtgccatcagacagtccgaagacagcggcatctcagaagaagatgagagattttgcaaaagagaacgggattgacttctgggaaggaaagggtgtctgccatcaggttatgatggagaactatgtccgtccgggagaactgatcttcggagctgacagccatacttgttcctacggagcactcggagcgttcggtacaggtgtcggatgtacagacttcctttatggaatggtgacaggacagtcctgggtacttgttccggaatcagtgaaattcaatctgatcggagaacttccggaaggtgtttatgcaagagacctgattctgacaattatcggtcaggtcggtgcgaacggatgtaactatcaggtgatggagttcaccggagaaggggcaaagacactgagcatcagtgatcgtatcgcactttgcaatatggcagtagaagccggagccaagacaggtatcttcgaggcagatgaaaaagcaatggaatacctgaaagagcatggccgtgagccgaaagctgtattccacagtgatccggatgcacattatatcaaagagtatacaatcgatctttctaaagtggaaccagttgtggcaaaacctgattttgtagataatttgagtccggcaaaggaagtgcgtggaattaagattgatgaagcatttttgggttcctgtaataatggacgtattgaagatcttcgtgtcggagcagaagttatcaaaggaaagaaagttgcagataaggttcgtttccttgttgttccggcaagtcagacaatttaccgtcaggctcttaaggaaggacttcttgatattttcatggaggcaggtgcaattgtaatgaatccgaactgcagtgtctgctggggaagctgtcagggagttatcggtgaaaatgaagttctaatcagtacaggaacacgtaatttcaagggtcgtgcaggacacccaagttcaaaagtatatcttggatccgcagcaacagttacagcatcagcgattaagggtgagatcgcacttgcatctgatctgtaaggtgaagggaacaagaggtaacttgtacagagaagaacttatatattttgaggtgaactatggataaatttacaggaaaggtgtgggtactcggagatgatatcgatacggatatcatcatcccgacagagtatcttgcactgaaaacaattgacgatatgaaacagtatggattcagtccgcttcgtccggaactggcaggacagatccaaaaaggtgatatcatcgttgcaggaaagaactttggatgtggatcttccagagagcaggcaccggagatcatcaaagcacttggaatccagtgtgtgatcgcaaaatcatttgcaagaatctttttccgcaattcaatcaacaatggtctgcttttgattgagcagccggatctgtatgatgatatgaaggaaggcgacacaattgatgtagtgatgaatcagtatgtagactataatggcaaagaatatccgatcgcttctctgccggagaatctgatgagcatcattcaggcaggcggacttgtaaaagccatgcgtaagctgaatggacttgaagattgagcagaaaggagagcgtgatgggcgagacgattattgaaaagattatcagacataatacaggaaaggcagtaaagccgggagatatcgtgacagttaatgttgacagatgcatgatccatgatattttcattccttttgtagcagataaatttgaggagatgggatttacaaagcttcatgatccggataaagtggttctgatttatgatcaccttgttccggcgagtcagcaggatgatacaagacatttccacaaaggagatgaatttgtagaaaaatacggactgactcacgtacatagaagcgacggaatctgtcaccagctgatgacagaagccggatatgtgaaaccgggagatatcgcattcggaacagacagccatacgacaacttatggttgtgtcggtgcattttcatccggaatcggttatacagagatggcaagtattcttggaaccggtacaatctggatcaaagttccggagacgatcaaagttgtgattgacggagaacttccggaaaatgtaatgtccaaggatatcattctccgactgatcggagatctccgtgcggacggagcaacttacagagcgctggaattctcaggaagcacaattgagaaaatgtcagttgcaagccgtatgacaatggcgaacatggcaatcgaggcaggagcaaaatgtgctcttttcacaccggatgagaagacagcagagtattgtgaggttgaactcaatgattaccagaagagtcttgttggagatgaagatgctgtctatatgaagacaatgacatataaggcagaggatttcgttccggttatggcatgtccatcccaggttgataagatcagagatgtcagtgaactggaaggaacagagattgaccaggtatttatcggatcctgtacaaacggtcgcctggaagaccttagagctgcggcagaagtactcaaaggaaagaaggttgcggactttgtgaagttgatcgttacaccggcaagccgcaagatctacagacaggcactggcagacggaacgctggatattctggcagaagcaggtgcgatcattacgcatccgggctgcggactgtgctgcggaagaacagggggaatcctttctgacggagaacgtgttgtagcaacgaataacagaaatttccttggacgtatgggaacatctaaggtagagatttatcttgcgagtccgagaactgcagcggcatgtgcagttgccgggaagattgtgaatccaaaataagaaggaaatataaaaagctattgattacaacaattaagatgaaatgtgttgcaatcgatagctttttaaaaattgttgtaactgtttttctaattgacaccttcgaatgattttgttatagttaattcacatcaaaatctcagacatatattttctatatttcatttgtctgaatgtgttatcgaaaggataactttatctcatattcaaggctgtatcagcaggagattccattttgatgagttacaaaataacaaaagaataaaaaccaggaggaagagtctatgggaaaagcagatgttaatgtgaatatctggttaagtgagaagaaacgatttgcaaatttatttaatggtgtgatttatggtggaaggcaggtgatattgccggaggatttggaagaagtgaattccgtttcatctgtcagtgtgaaaaatcgggccgggaaaacaaagaatatgaaaagataccgcgatattattatgaaatggcggaatcaggctacgcttgtgctacttgcaaatgaatcacagggtaaggttcattatgcgatgccgcacaaggtgatgctttacgatggaatggattacgaaacacaaattcggaataattggaaaaactttaatgaccgacgaaagcagaacaaaaaagcaggacagccgttagagcatcttactgcaggagaatatctgtcgcgatttcgaaaaaaggatcgattgataccgattatttcattagtcttttactatggttcagagccgtgggatggacctgttgacttatatgatatgtttcagttggaaggaacgaaagaagagaaagaaattttggagaaatatcttccgaattataagatcaatcttgtagatgcagaacgagtggaagatgttgaaaaattttcggatgatttacaagtgatactaactatgctaagatatggggatagtaaggaagaattaacagattacattaacgagaataaaaagttctttcagaacgttgactatgaaacgagtcaggcaatgaaagcttttctaaacatgaaacaaataccaggtgaagcggaacataaggaggagatggttgatatgtgtaaggcaatacaggaaatgtatgatgatggagtgaaagatggaattcggcaaggtgtagagcgtggaatagcagcagttattagaacatgtcggaatttaaatgtttcaaaggaggatactcttaataatattcagagagaatatgagctttcaaaggaagatgcagagaaatatctggaaacatattggaaataaaaagggaaagcgattctttaaccgctttcccttaatttacgcgaacaacgagccaaagtccgtgcttgcacgagaccttggtgactgtcgcgataacttgagaaactcacggagcgtgtttctcatagttataattgtttggaattaatctccccaaatgctatacgtatttcggatacttacagaatatcaatatattccccagccagtgccttattcatgcttcttactgcacagaattttccacacatactacaagtatcgctgtggtcatcctccggttttctgctgtcgcggattgcttttgcagtttctggatccagagcacattcaaactgtgcatcccagtcaagaacacggcgggcatctgccatcttatcatcgatatctcttgcaccaggaattcccttggcaatatcagcagcatgagctgcaattttagaagcaatgattccctgttttgtatcttcaacatttggaagagcaaggtgttcagctggtgttacatagcagaggaaggaagcaccgttcattgctgcaacagctccaccgatcgcggaagtaatatggtcatatccaggcgcgatatctgtaacgataggtccaagtacatagaaaggagctcccatacagatggtctgctgtactttcatgttcgctgcaacctgatcaagcggtacatgtccaggtccttcaaccataacctgaacattatgatcccaggcacgttttgtcagttcaccgagacgcacaagctcttcaatctggcatacgtctgtagcgtcagccagacatccaggacggcacgcatcaccaagtgagattgtcacgtcatattcttcgcagatatcaagaatctcatcatagtactcgtagaatggattctcttctcctgtcatgctcatccatgcgaatacaaggcttccaccacggcttacaatgttcattttacgtttatgctttttgatctgctcaattgtttttcttgtgattccgcagtgaagtgtaacgaagtcaacaccgtcttctgcatgcatacggattacatcaaggaaatcctgtgcagtcagagtagcaaggtctctctgataatgaatgacactgtcgtatacaggaactgtaccgatcatagcaggacattcagaagtcagtttgcgacggaacggctgtgtatctccatggctggaaagatccatgatagattcggctccaagttctactgcgctcattaccttctgcatttcaatatcataatccttgcagtcacgggaaactccgagattgacattgatctttgtgcggagcatgcttccgacaccttccgggttcagggacttgtgatttttattggcacagattgcgacctttccttcagcgacaagcttcatcagtttgtcagtgtccatatgctctttttcagcaactgttttgatttccggggtgagaatccccttacgagctgcatccatctgggttgtgtagtttctcatgttgttttgcctccattcgtatatgtgaattatataattttgacgtcagcaaaacacggacagcgtacacgagaaaagctacggttccatgcatatgaatagatgcagaaaggaatggtaactgtttagctacactaccagcgaatataagattatgctgacgccttcacggagaaatgttaataactacaagataaaggagttgttaacataatactccggtgattacagattgattctgcattttcttgtgcggtacaaggtggtgtccccaatgtatcgcatgtaactgttcggaaattttgcagttacggattaagaagtcggaaaaagctgtgccattactccacttttctggaatactgaaatcagcaggaatgccaggatacttccggctactgttgagatcaggaatgggatcacatagataaataatcctgccggtgctgctcccataaggaataaagcaaccggataagcagcaattcctccgagaatacctgttccaagtgcttctgcaagacaagtaaggcttaaattcttacatttcttgtaaacaagtccacagcagagagctccgatcatactacccgggaaagccatcagacttccgattccaagtatattgcgcagaaggcttgcacagaatgcaattccaacgccccagccgggaccaagaagtacggctgcaaagatatttaccatatgttgaaccggtgcacatttacttccggctacaggaaagcttaaaaagcttccaacgatggcaagagcggtgagaacacctgcaagtgccagtttttttgtgtttgttgtctgtttcataacttgagtctcctttcaaatgtaaaaaaaggatcctcacctgagtgaagatcctaccagctgtccgaagtaaaaagagatgcaagggcatctcaatcattacatggtatcaattccctccgttggcattatccaaatcaggtttaaatgggtcgaaacggtaacacgtctcctctcagccggttctgaccagctcccctttgacaatattaatttgttgtctgttgttattatgaactgaaattacataaatttcaagacattttttgaaaatataatatttcagagaatgtatcgctgctgttcacacatcactatcccgcgagatgttttggcatgaatatgccaaaatcccgagacatgcaagaggaagagacggaaaaatttaactaaggtttcatatcataataatttgtattgaaaaacaggaacaaaaacaatacaactttgaatttatatacattttcaagtgaaaaagattgggtatcctgcgaattgtattgtaacatgtattattgtatattaagtgcataacgagaatgtactgatcagatcgataaaaatcagagtgtcgtatgatggtaatgatggtcgatcgtatagagaggtcataagcgaatgaaaaaatttgaaaaaatcgtaacctggattcaggaggaagtcaggtcgggaagaaaggtttccggggagaaacttccttcagaacaggaattatccgaacaattccaggtcagtcgtcagacggtacgacgggcattggaagaattagtaaaagagaatattgtggagagcagacgcggaagtggctcttatatatgtgaagatgcgggaatgcttcttggaaatacagaaagaagagcagatcatgaagaaaaacgaatcgcagtaatgctgacgtatatcgatacctatattttcccaattattgttcgggaaattgagaaaaaagttactcaggcaggcggaatccttcagattgcaatgacagacaattctgtagcaaaggagcggatgcatctggaagaatttttgagaacaagaagaattgatggtttgatcgcagagcctgtaaaaagtgggcttccgaatccgaatttagatttatatcagaaattacagaaatcaggaataccggttgtgtttgtgaatagtttctatgagaatctcacaattccgcatgtcagtctggatgatgagaaagctggatatcttgcaacaaaacatcttttagaatgtggacatacaagaatcgccggaatcttcaaggcggatgacgggcagggaagaatgcgatatgcaggatacacaaaggcactcatggagcattcacttaagattaaaaatcgtcagattttatgggttgattcggaagatatccgggaaatggagatggaaagtgacagaatcctgaaacgtttagatggatgtacggcctgtgtctgttacaatgatgagattgcaagtaaactggtcaaggtattgcaaagtgcggaaatcaaagtcccagatcagatttccgttattggaatcgacaattccagtcttgcaagattttgtgaagtaccgatcacatcggtgaataatccagcgaatgagattggaaaatgtgcagcacagattatattagataagattgataaaaatatggaaatgtactcagcggaatttgcaccggaacttgtgatgcgaaattctgtgaaattatataatgaagtcatgtagacagcagacgaaaggagaagaacaatgttagaacagttaaaaaaagaagtgtatgaggcaaatatgctgcttccaaaatacgatctggttacatttacatggggaaatgtaagtggaatcgatcgagaaagcggactttttgttattaaaccaagtggagttgaatatgataagctgactcctgaagatatggtagttgttgatctgaacggaaataaagtagagggacgttacaatccatcttccgatacaccgacacatgttgttctttataatcgttttccaaaaatcggtggtgttgtacatacacattctgcatgggcaacaagctgggcacaggcaggaagagatattccatgttacggaacaacacatgcagattacatctatggagaaatcccatgtgtgcgtaatctgacgaaagaagagattgaggaagcatatgagaagaacacaggagttctgattgcagatgagtttgaagctaagaagaaagattatattgcagttccggcagttctttgtaagaatcatggtgtatttacatgggggaaagatgcacacgaagcagttcacaatgcagttgttgcagaagaagttgcaaagatggcagcaagatgtgagatgatcaatccgcaggtaaaaccggctccgcaggaacttcaggataagcattactatagaaaacacggtgcaaatgcctattacggacagaatacagaaaaataagaactgtcaagtataacacagtaacaaattaagtgataaataaaaaataactataaacattttattacaaggaggacacaaaaatgttaaagaagaaagagtacaaattctggttttgcacaggttcacaggatctttacggagatgaatgtctggcgcatgtagcagagcatgccaaaattattgtagagaagctcaatgagtctggagttcttccatatgaagttgtatggaaaccaacattgatcacaaacgaactgatccgtaagacttttaatgaagctaatattgatgatgaatgtgccggtgtcattacatggatgcatacgttctcacctgcaaaatcatggattcttggacttcaggagttcagaaaaccactgcttcaccttcatacacagttcaatatggagatcccatatgacacgatcgatatggatttcatgaatgagaaccagtcagcacatggtggacgtgagttcggacacattttcacaagacttggaatcgagagaaaagttgttgttggacactggtcagacgagaaggtccaggagaagatcgcttcctggatgcgtacagcagttggtgtgatcgaaagcagccatgtacgtgtcatgagagttgcagacaacatgagaaatgttgctgttactgaaggtgacaaagtagaggcacagattaaattcggatgggaagtagatgcttatccggtaaatgaaatcgcagagtctgtagatgctgtaagcgcagcagatgtaaatatattagtagaagagtattatgacaaatatgagatccttcttgaaggaagagatccggaagagttcagaaaacatgttgctgttcaggcacagattgagcttggattcgagcgtttccttgaggagaaaaactatcaggcaatcgttacacattttggagatctcggtgcactcaaacagcttcctggacttgcgatccagcgtctgatgcagaagggatatggatttggagctgaaggagactggaagacagcagctatggttcgtatcatgaagatcatgacagaaggcatgaaagatgcaaaaggaacatcgatgctggaagattatacatataattttgtgcctggaaaagaaggaatccttcaggctcatatgcttgagatctgcccatctatcgcagatggtccgatcagtatcaaggtaaatccactttctatgggagacagagaagatcctgcaagacttgtatttacatcaaaagaaggaaaaggtatcgcaacatcactgatcgatcttggagaccgtttccgtctgatcatcaatacagttgattgtaagaaaaatgaaaaaacaatgccgaaacttccggtagcaacaaacttctggacaccggagccggatctcgcaacaggagctgaagcctggattctttgcggtggtgcacatcatacagcattctcttatgatatcactgcagaacagatgggtgactgggcagcaatgatgggaatcgaagctgtatatattgataaagatacaacaatccgtaatctgaaaaatgaactcagatggaatgaacttgcatttagaaaataaaaaatcattaagaggataaccttcaatacttaaaaattcatcgaaaaatcattgaaatgaagaaaacgaaaaggtataatatctaattagaaaaaaagtctccgtaaatctgtccgttaagaaaatgcaaagcagacggatctgcggagcaaaaaggagtttaagtatgagtattaaaattggtattttaggttatggtaatcttggaagaggcgttgagtgcgcagtaaagcagaatgatgatatggagcttgtggcagtgttcacaagaagaaatccggaagatgtcaagattctgacagagactgcgacagtttgtaatgtagcagacgtagaagactggaaagataagattgacgttatgataatttgcggaggaagcgcaacagaccttccaaaacagacacctgtttacgcaaagatgttcaatgtaatcgatagttttgatacacatgcaagaatcccggagcattttgcaaatgtagatgcagccgcaaaagaaggcggacatgtaggaatcatctccgtaggctgggatccgggaatgttctcactgaacagactgtatgcgaatgcgattcttccggatggaaatgattacacattctggggcaaaggtgtaagccagggacattctgatgcaatccgcagagttgaaggtgtcaaagacggaaagcagtacacaattccggtagaggctgcactggaggcagtaagaaacggagagaatccggaacttacaacaagacagaaacatacaagagagtgtttcgttgtactggaagaaggagcagatgcggcaaaggtagaagaagagatcaagacaatgccgaactacttctcagattatgatacaacagtacactttatcagtgaagaagaactgaaagcaaaccacagcggaattccgcacggtggatttgtactccgcagtggaaagacaggatgggatggtgagaataagcacctgatcgaatatagtctgaaactggattccaatccggaatttacatcctctgtactgatcgcttatgcaagagcagcttacagactggcaagcgaaggacagatcggatgcaagacagtatttgatattgcacctgcatacttaagcgcaaagagcggagaagagcttagaaaacatatgttataaatacatgttgcgtgacattttgcggcaaaatctgctgtgaaaaaacggaagcaatgtgttatatgaatcggatgcggcgatgacttattaaaaggagttatacgccgcattttttacaggagggcaaaaatatgagaggaaaagaagagattaagaaaacaatcgaagacggaaaagcggtgcttggaattgagtttggttctacaagaatcaaagcagttttaattgatgaggataaaagtccgatcgcatccggaagttatgactgggagaatcagcttgtagacaatgtctggacatacagcatggagaaaatccagaatggtcttcagggatgttaccaggatcttgtgaaagatgtagaagcaaaatatgatgtgaagcttacaaaatttgcagcactcggagtcagcgcaatgatgcatggatatcttgcgtttgatgagaatgataaattgcttgttccgttccgtacctggagaaatacgatcacagaagaagcttctgaaaaactgacagagctcttctcttatcatattccgcagcgttggagtattgctcatctgtaccaggcaatcttaaatggtgaagaacatgtaaaagatgttcgttatattacaacacttgcaggatatatccattggaaactgaccggcaagaaggtgctcggaaatggtgatgcagcaggaatgttcccgattgacatagctactaagaaatttaatgagaagatgatggatcagtttgatgaacttacagcagaaaagaatttcccatggaagatccgtgaaatccttccggaagttcttgttgccggagaagacgcaggtgtattgacagaagaaggcgcaaaactgcttgatcctacaggaacacttcagtcccaaattccaatgtgtcctccggaaggagatgctggaacaggaatggttgcaacaaacagcgttgctgtccgcacaggaaatgtatctgccggaacaagtgtatttgcaatggcagtacttgagaaagacttgacaaagccttacgaagaaattgaccttgtaacaactccggccggagatcttgtagcaatggtacactgtaataactgtacatcagatctgaatgcatgggtgaacctgttccgtgaatttgcagagagtatgggaatgacagcagatatgaaccagatttttggaacactttataacaaagcattagaaggagattccgattgtggcggacttctggcttacaactatttctcaggagagcatattacaggatttaacgaaggaagaccgttgttcgttcgtaaacctgacagcaaatttaatcttgcaaactttatgagagtgcatctttatacttctcttggagcattgaagacaggaatgaatatccttctgaaaaaagaacatgttgcattggatcgaatgatgggacatggcggattgtttaagacaaaaggtgttggacagagaatccttgcaggagcaatcgatacaccggtttatgttatggagacagcaggtgaaggtggtgcatggggaatcgcactgcttgccgattaccttattaagaaagaggacaaggaatcgctgacagattatcttgagaacaaagtattccatgatgcagtgggaacaggaatggatccggttgcggaagatgtggaaggatacgagaaatttatggaaacatatgctaagggtcttgcaatcgagaaagcagcggttgaaaatctatagttatgtgtgttgctggacggtggcagatgaagtggaaatgatattttcaaggggctgtacatgatatcccatctcttcccatctggtcagtagttcatccaggatttcagcattagtggaagatgtgctgtggagcagaacgatagctccgggatgaatccttccgaggagtttggagaaagcttcttctttggatggctggttatcctgataccagtctacataggcgagactccagaagaaacttttgtaaccaagttcttttgccatttgaagattagcttcactgtattttccctgaggaggccgatagtatttggtcatattctttccggttacgtttttataggcagtttctacatagtccagttctttttggaaatcttctatagaagaaatatgggacatgtcggggtgatgccaggtatggtttcccacggtgtgtccttcttttattatctgtcggatcagttcaggctcagagtcaatgtaggttccgacaacaaaaaaagtggcttttacctgatgttttttcagtgcatcaaggatggcagatgtatttccgttttcgtaaccggcatcaaaagtaagatacagaactttttcagacgtatcctgtgcgtaataagcatccatagatgcaagttcctggatcgaagcatttccaacaggagttttgccttcttcctgaaaacttaacccccagtttccttctgaagaaagtgtgagatcaggaagggcacaggaaatcgtccggggaatagaagtcacggagttctggttgacaggagaggggcgagccgaagttgactcattagaaaaagcgaaaatctgttctttaagaaatccagctccaatacctgaaaaataagagaagataagaaataaaatacaatatttttttgatttcaaagggtgtatgggaaaatggatacatttccgggaaagagagagtttcattcgttcacctcggaaaatcgttaatagaatatatgaaattgtatttctttttatacttgttgagcaggcaaaggaatgatatactaatccggtaattgtattgtatcccgcaagttgggaatgataacaaggaggaattgaataatgaaaacaaagaaacatgacactcgttggatggttagtgttgcacttatggcagcgatcgtgatcgtactggccaatacaccgcttggtatgatccagctccctatcattaaggcaacaacagttcatattccggtgatcctcggagcaattctgttaggacctggtgcaggagcaattcttggagcagtttttggtatatgctctctggtcagtaatacaatggctccgacactcttatcctttgcattttcaccatttttaagtacaaccggaattcctggggcgttgaaggcaatctggatatctgttggatgcagaattctgatcggtgtggtagcaggatggctgtgggtactttttacaaagattaaactgaatcagtttattgcacttccgattgtgggatttgttggttcaatggtgaatactgtcactgtaatgggaagtatttatttcctgtttgcacagcagtatgccgaggcaaaagaagttgcacttacagcagtcttcggtctggtgatgggaactgtgacagcatctggtattccggaagcaatcgcagcagcaattctcgttcttgcacttggaaaagtacttgttgtagttttccgcaagatgaaccttggggctgtgaatgtggaatctgcaaaataacagacgaatttaaaaatagaagaaagtaatgaatcatgaagaagttaaatgaatgtggaattaaggctgttatcagcttataaagttacaaaatagtaacaaaaccacaagaaagcaacttcttcatgttgtttttttgatgaattttaattgctgttgtagttgattaagtgtcaggtgtgtattataataaagctatatgatatgcaaaaactgttggaagatcagaacagcagaaagaagaggagaaaaatatggcagaggattacagaaaccaggcaatcggcgtatttgaactggaaagtgagtgtatctgttttgtagcacttgatgcggcagcaaaagcagcagcagtaaagattcagggtgtggagagaaatcgtcttgcggcaggagcctgcgtgaagatgagaggaagtgtctctgacgtgaaggctgcaatggaagcagcactggatgtagccagaccgttgacgaagattgtttcccatacggtgattgcatcaccttctgaggatacggaaaaagcaattgcaatgacaattaataaataggtatttgttcaattgtctgttgtacatatgagaagagtattgttttgtgaggaaatcagagaaggaaaagaaagggaaataagatgaagaaatatggagcatatggcctggtagaggtaaaaggagaatccaatgcggtgatcgtagttgaccgcatgttaaagactgcagaagtagagtatgtgacacaggacacaaagtgcggtggacatgcacttgtttttgtaggtggcagtgtatcagtagtaacagcagcggttgatgaagtgaaaaataatgcaccgtgtaaagttatacaaactgctgtaatctccaatccgtctcaggagatggttgacatagtagaaatgtttaagaatagataagagttaggattaagtaaaatggaaagagcaatcttgttttttgatattgatggaacagtgttgagtgaagtgacaaaagaggtaccgcaaagtgcgattgaggcaatggaaaaagcacgagcggaaggacatctgctgtttattaatacaggcagaacaatctgtagtattccgacagaggtgagaaaattccaatttgatgggtatttatgtggctgtgggacatatcttacagaacatgatgaagttttgctaaaaagctcgattgagaagcagagaggtatagaactgctgcgaaaagcaaaagaatgtaatcttggtgttattgcggaaggacaagaggattgttattttccagggcacatatcacgatttgacaggttagaatctacaagaagatattttgcatctagaggaataggaatcgaacagtctctagagagcgaaagatttgaatatgataagttatttgtttacgtagatgataagagcgattttgattcttttcgtgagtatcttggagatgacatggaagcacttgaccgtggcggaaaggcctatgaggtaattcagaagggattttctaaagcgacagcatgtcagtttattatggaaagatatgacatggatgcaagtcatgcgtatgtcttcggagacagcagtaatgatctggcaatgtttgaatatgcggagcatgcgattgcgatgggcagacatgattcggtattggatccacatgctgagtttgttacaaagacagtggaaaatgatggaattgcatatgccatgaagcattatggattaatttaacagaaaatagaaaacaggatctgtcaggaaagataaaactgatggatcctgtttttttattctctgttatacaataccggcaccgtcaaagaagctgacatctgttggatatacatagctgtctccaatgtcatgaagaagtacaacattcaagtgattattcaggttctttttatccaaagaaattgcatcagtcagtacatcaatcggtaaattagagttgtccggaagtttataaatctccaatgcctttttgatctgttctgcacatccggatgtagttaatcctttctcttctgcaatctttgtaatctgatacataccaattccaacagcctctccatggctttcgcgctcataattgaagtgctgttcaatcgtgtgcgcaagtgtgtgtccaaagttcagaaggatacgttctccaaggtcaaactgatcggcttcgacaacgattcttttgatatcaacgcagcgtgcaataatctgtgtcagcttcggctttaaatcatcgaaggaagtatgtctacataaaagctcaaaaagctctttgtctttgatgcatccatatttgatcacttcgcccattccatcactgatgaaatgatctggcaatgtattcagcacatctgggtcaatgatgactgcctttgggtgataaaatgcaccaacaagattttttccctgcggaagatctaccgcaacttttccgccaacagaggaatcaacctgtgcgaggagtgaagttggaatctgtacaaatttgattccacgcagataactgctggcagcaaatccggcaagatcaccgatcacaccgccaccaagtgcgatgagcaggtcacttcgtgttagttttgcatttattaatgcttcatagatcttaggcagagactggaaactcttagtaggttcgccgtgaggcagaacaaaagagtggcattcaaaccctgagtcagacaatgcttttgtgataatttctccatagagaggaaaaacattatcatctgaaacgatcatgatttttttcccggagaacacttcgcttacaagttctccggtttttgcaaggattccattttcaatatggatcggataagaattcggtccaagatcaactgttaatttcatgacgatctccttagaattttttaccgactacttcggcaatttgacgaacttgctgaagcagaacatcatatttctcaggtttcaaagactgggctccgtcacaaagggcagcttccggattgttgtgaacttcgatcataagtccgtcagcacctgcagcaacagcagcctttgccataggctcaacaagccaccattttccgccggcatgacttgggtcaataacaattggaagatgtgtcttgctgcgaagaacagggatacactgaagatccagagtgtttcttgtaaaagtctcaaaagtacggataccacgttcacagagaatgacattttcattaccggatgccatgatatactcagcggacatgatccattcttcgtatgtggcattcagtcctctctttaacaggattgggcggtcaacctgtcctaattctttgagaaggtcaaagttctgcatgttgcgggcaccaatctggatcaggtcaactttctcattgaatacatccagatacttggaagacatgagttctgtgacaataggaagtccgacttcttctctgactgcacagagaatatcaagtccctcaagtccgagtccctggaaagcgtaaggacttgttcttggcttgaatgcgccgccgcggagaagatttgctccggatgcttttgctttttgagcaatctcaagaacctgctcataggattctacagaacaaggtcctgcaatcagtcctaaatgttcaccgccgatcttaacaccggaaacatctataatagagtcttccggatgaaatgcgcgattcgcaagcttataaggctcctgtacatgcataactttgtcaacacatgtgtcaacttcaaattgtcttgaatcgatcagtgttgtatctccgatacatccgatgatcgtcattccggttccctgaaccagatgagtgtcaagtccgtgcttttttacaagattttcgacacgatgtatattttcctcagaagtatgaggtttcaaaacaataatcatttttatcatcctccttaatattcgtgctgtaaaattttagctgtttaaagtgcgaaaacatatgtatcataaaacatatacaataagatgtcaatgtcttttggattatttgaagaaatatatcaaaaaaagatgaaaaattgcaggtttatttcatgaataattacattgacggatagtgcgtgcagtgctaatctaaaaagcgtgtcatgtgtagagagagttcttctgttactgttctcctgatatgagattgacagaaactgacggaagaatcgtttctggaatttgacgtgtaggcttacatattaaaaagaggtaaaacaaatgaagattttaaaacagtttggtgtgatattcggggtttgctgggtcagtcttgtgatcgaacattatctgccgttttctttcccggcgagtgtgatcggtatgattttattgttgctctgtctgctgaccgggttcttaaagattgagcatgtgcaggaaaaagcagatttcttattaggaaatatggcattcttttttgtaccggcaggtgtaagtattattaattattttgacattttaaaaagtacagtgcttcagcttcttgtaatctgtgttgtatccacgattgtaaccttcgctgtgacagcgtatgcagttacactgacagtgaaattgatggagaagaaaaaaggaggaaagaaagcatgaaagaattaatgacatctccttattttggagtagggttgagtgtggtagcattctggataggagaaaagctgcataataaattaaagacaccgatttgcaacccgctgattgttgcgattgtattaattgtaggagtccttttgatttttgatattccttacgatagttatgatgtgggtggagctttgatcaatatgtttcttgctccggcaacagcatgtcttgcggttgcgatttacacaaaaattgatatcctgaagaagtattggcttccaatcgtggttggatgtacagcagggtcagtagcatctatgggaagtgtctatgcaatgtgtaaattatttggactggatcagagcatgacagtttcactgatccctaagtcagtgactacacctattgcagtgagtgtttcagaaccggcgggcggagtagtgccgattacagtggttgctgttattttcacaggaattctcggaagtattctggctccgacattaattaaagtatttcatgtaaaagattctgttgcggcaggacttgcaatcggtgcctgtagtcatgcggtcggaacatcaaaggcaattgaaattggtgagatcgagggtgcaatgagtggtcttgcaatcggaatctgtggaattattacagtgctgttttcaatgcttattatgtaggcggatttaataatcatgaaaagaatcgattcaatcaggatttttcgtatagaaacattgcctgaaagaaatcggttcttttttttgaaaaaaataaggatttcacgcttcggtcatgacaaatgtggaaacttatgttatactctaggttaggttagtgccattatactttggattatggtttgtgtgaaaagacagaacaggcactgaaagatagaatttaaaggagctatacggtatgaaaagagtattgttaaagctgagcggagaagctcttgcaggcgagaagaagactggatttgatgaggcaacttgtatcggagttgcgaagcaggtaaaacagcttgtagatgaaggtgtgcaggtagcaatcgtaacaggaggaggaaacttctggagaggaagaacaagtgagacaattgaccgtacaaaagcagatcagatcggtatgcttgcaacagttatgaactgtatctatgtgtcagatattttccgtcatgtaggaatgaagacagaagtattcacaccttttgtatgcggagcatttacatctctgttctcaaaggatgcggcagttgcagcactggaagaaggaaaggtgatcttttttgcgggcggaacaggacatccatatttctcaacagatacaggtgcagttctccgtgcaatcgagatagaggcagatgcaatgcttcttgcaaaggcaattgacggtatctatgacagtgatccgaaggtgaatccggcggcagtgaagtatgatgaaatttctattcaagaagtgatcaatcagaaacttgcagcagttgatctgacagcatccattctctgtcttgagaataagatgccgatgcttgtattcggacttaatgaagagaatagtattgtgaatacaatgcagggaaaattcacaggaacaaaagttactgtataaactattttgaatagcggaggaattacagcatgaatgaaaaaaacaaaatctatgatgataagatgacaaagacaattaacaatctggatggagaacttgctacaatccgtgcagggcgtgcaaatccacatgtactggataagctggcagttgattactacggaacaccaacaccgatccagcaggtagcgaatgtatctgtaccggaagcacgtatgatccagatccagccgtgggagaagagcatgctcaaggcaattgagaaagcaattcttacatctgatatcggaatcaacccgacaaacgatggaacatctatccgcctggtattcccggaactgacagaggaccgcagaaaagaacttgcgaaagatgttaagaaaaaaggtgaggaagcgaaagttgctgtacgtaatgttcgtcgtgatggaaatgttgctttcaagaaactgaaaggaacggaaatttctgaagatgagatcaaagatcttgaagatgaacttcagaagatcacagacaagtatgttgctaagattgataagatggtagaggcaaagtccaaggaaatcatgacagtctaaatcgaaaacagcagagctgaattgtcagattgtaatgtggaaaaactgtttacagattatttgtacgcagataagtttttaagaacatggaggcttatttaaggcctccatttcttcttaaaaaaagttgcgacagagaggatgagaaaatgaacgtaccacagcatattgcgattattttagatggaaatggacgctgggcaaaatcaaaaggaatgccgagaaattacggacatgcacagggagccaagaatgttgagaaaatctgtgaagaagcatggcgtatgggaatcaagtacctgacagtctatgcattttctacagaaaactggagcagaccacagaatgaagtggatgcactgatgaaacttttaagaaattacatgaaaacatgtctgaagacagcggcaaagaatgatatgaagatccgtgtgatcggtgacattgaaccgctggatgaggatatcaagagccggatcagagaactggaagaggcaacagccaacaatggagggcttaattttacaattgccctgaattatggaagccgtgatgagatgacaagagcagccagaaagcttgcgaaggattgtgtggccggcaaagtaaatccggatatgatcgatgaatcattatttaattcttatctggatacaaatgacattccggatccggatttgatgatccgtacaagcggagaacaaagattatcgaattatctgctttggcagctggcctattcagagttttattttacagatattccgtggccggcatttacgaaagaagagcttataaaagcggtggaagaatataaccgcaggcatagaagattcggcggagtagaggaggcggaataaagatgtttaaaacaaggttgctaagtggaatactattagtgatcatcgcacttgtcacagtgatcacgggcggaaacctgctctttgcagttttgttattaatcagcctgatcggaatggcagagttgtataaagtatttcacatagagaagaaggcacctggaattgtcggatatatttttgcaatcctgtattatggggtattatattttaaaccgcttcttccgggagaatccttaaactggtttgttatgctgtttatggcttttttgatctgtcagatggcggttcttgtatttgcctatccgaaatataatacacagcagatttttgcaggctttttcggaatgttctatgtggcagtgatgctctcttacatttatcagacaagaaatcttccgggaggaatcttctcggtatggcttgtatttgtatgctcctggggatgtgatacttgtgcatactgtgtcggtatgttgatcggaaagcataagctggcaccgattttaagtccgaagaaatcaatagaaggtggaatcggaggaatcctcggtgcggcattgatcggagtattgtatggacttgcaattaattactggggaaatgcggcggcagatttattgcaatatgcgatcattggtgcagtcggtggagcaatttcacagatcggggacctggcagcttctgcaatcaagcgatatcacaacattaaagattatggcaaactgattccgggacatggagggattcttgaccgttttgacagtgtaatctttacagcacctattattttctatctttccttgtttctgtaaaaggagatacatgtgtgatagatgcgttgctgatccacagttttgtggatcgtaacataaatgcagaatagaggtaaaaagttacgatgaagaaaattgcaattttgggatctacaggatccataggaacacagacattggaaattgtcaggacaaatggcgatctggaggttacggcacttgcagcagggaataatattgatcttctggagaaacagatcagagaatttaagccgaaactggcagcagtctggaaagaagaaagagcaaatgaattaaaagacaaaataaaagatctggatgttaaagtagtaagcggtatggatggactacttgaagtagcgagacagccggagtcagagattcttgtgacagcaattgtcggaatgattggaattcttcctacaattgaagcaattaatgcaggaaaagatattgctttggcaaataaagagacactggtcacagcaggacatatcattatgccgctggcaaaggaaaaaggagtttctatccttccggtggacagcgagcacagcgcaatcttccagtctcttcagggaggacagcagaaggctctgcataagattctcctgacggcatccggtggaccatttagaggaaagaaactggaagacctggcgaacatccaggtagaggatgcattgaaacatccaaactgggcaatgggacgcaagattacaattgactcatctacaatggtgaacaaaggtcttgaagtgattgaggcgaaatggctctttggagtggatgtagatcagattcaggttgttgtgcagccacagagtatcattcattcaatggtggaatatgaagatggtgcagtaatcgcacagcttggaacaccggatatgaaacttccaatccagtatgcactctattatccggaacgtcgttatcttccgggtgacagactgaacttttcgacacttcagcagatcacgtttgaacagccggatctggaaacattttatggattgaagcttgcttttgaagcgggaagaacaggaggttcacttccgaccgtgttaaatgcggcaaatgagaaagcagttgcgctgttccttgacagaaagattaagtatctccagattcctgagattattcaggcgtgtatggaagcgcataaaaatattgcggctccaaccgttgaggagatactaaagacagaacaggaaacatatgaatttattaaaaacaggtggtaatgtatgggcataatcttggcaattctgctattcagtgcgattgtaatctttcacgaattaggacactttctgcttgcaaagaagaataagattcgtgtggatgaattctctctggggcttggaccgactatttttggaaaacagtttggagaaacgaaattcagcttaaagcttcttccgtttggtggagcctgcatgatgggagaagatgatgtggatgatatgtctgaagggagctttaacagcaaatcggtctgggcaagaatgtcagtaattgttgcaggtccagtgtttaatcttattcttgcatggatcctctgcatgattattattggctggacgggatatcgagcaccgattgtcagtaatgtgacagatggatattcagcgcaggaggaaggcattgaaccgggagacgtaattaagaaaatcggagggaaatcagttcatatctggaatgatatcagtctgtataatatgatgcatgccgggacgaaaagtgtagaagttaagtatgaacgtgatggtaaggattataccgttgtgctggaaccaaaacagaacgagggagatgcttttcctctgcttggaattacaggtggtgagatggttcgtccgggtctgtttggaacagttcgatacggagcatatacggtgaagtattggatcacatatacagttgacagtctgaaaatgttgatcagcggaaaggtaggagtaaaagatctttccggtccggttggaattgtcagtgcggtagataacgtttatcaggaagcagctccggcaggcatggtagtagtgattttaaatcttctcaatataggagtacttctgaccgccaatctgggcgtaatgaatctgttaccgcttccggcgttggacggtggacgtcttgtattccttatcattgaggctgttcgcggaaaaagagtaccgcctgagaaagaaggcatggtacattttgcaggatttgtgcttctgatggcattgatggttgttattatgtttaatgacattctgaaacttgtgtagaaaacaggaaagaataggagtttcccgcatatactggaaaaaggaaacgaatcagatgtgggagacaaaccatgaaactttttcaaccgatacaagggtcacaaggttcaattgaaagcaaagaaacgcaggagaatctgaccgatcgtggtcagctgcagataaatgttacatcttctgtgaatgcatttccggtaaaggaagcgcggatttccatctcttatacaggaattccggaaagtatattagaacaggtggtgacggattcttccggtcagacagaagtggttgaactgaatgcaccaccggaagaatggagtctggatgagaacgaagaacgtcaaccatattcagaatatacattgaatattgaagcagagggatttgagtcgatcagtgtttcgggaacagagatcctggcaaacacaaaggcaatccagaatgtacgcatgaaacaaaaggatcagagcagggaagaagagcaggtattcgtcatccctgctcatactttatatggaaattatcctccgaagattgcagaggaagagattaagccagtaaatgaaacaggagaaattgtcttgagccgtgtggttgtaccggaatatattatcgtacatgatggatcaccgcgggattctacagcacaggattattatgtgaagtacaaagattatataaaaaatgtcgcatcaagtgaaatctatgcaacctggccggcagacaccataagggcaaatgtgctggcaattatgtcattcactttaaacagggtttatacggaatggtatcgaaataaagggtttgatttcacaattacatcatcaacggcatttgaccataaatggatcccggagcgcaatatatttgagcctatttcagtgattgtggatgaactgtttgcagactatctgtcacggccgaatgtgcgccagccaatcctgacacagtattgtgatggtcgcagagtgagttgtccaaactggttgacacagtgggggtcgaaaagtctgggagaacaggggtattctccgattgaaattctaaggtattattatggtgatgatatgtatatcaatacggcagaagcaatctcaggtgttccgtcttcctggccgggatatacactggaacaaggttcacaaggtcccaaagtgcgccagatacaggaacaactgaatgtaattgcgggtgcatatccggagatccctaaattggaggaagatggaatctatggacctgaaacagaagcggctgtccggaaatttcaatctatattcggtcttccggtaaccggagagatagattataaaacatggtataagatatcagaaatttatgttggcgtgtcaagaatagcggagctttcataaagtacaggatcagttcagacaggagacagtgaaattaatggaaagagacagaagacgaaggaaaaaacgacgaagaaatagaaaaacaagaagaaaaggattcgtgtttcttgtacttcttcttgtggtgatcggagcagcaggtgtattaaagatgataaaagcaacacctggattattctgtgagtctggaaatatacttttgtctgattcaggtcagaaaatagaatttccggagttaaatgtatcagaagaagatgttgaagacggtttttattatcagcagctgtcggaacaggaaaaacaagtttatcgcgagatcctgcagggggttcgttccatggatgagaccattcttcttcatgcaggcgagaacgatgaggctggaaagatatacgaatatctgatgtatgaccggtcggaattgttctggtgtgacgggagctcaaaaatgacggtatacaaagattatacagagtttcatccgtcttatatctgcacacaggatcagagagaatccagacgggagcagattgaaaatgcggcacaagaggtacttgcaggtgcgcagggatgtgagacagcgtatgagaagatcaagtacattttcaaatatcttgtagatactgtggattatgatcaaaacgcattggataatcagaatatttatagttctttggttggaaaaaaatccgtctgcgcaggatattccagggcagcgcaatatctgttgaaacagatgggaatagaatgtatttacgttgtgggaacagtaaaagagcagggggcacatgcatggaatatagtgaaatgtgatgataagtattatcagatggatgtgactttcggagatccgatctttcaggagaatgagacgggagaaacgctacctcatgatcttgtgaattatgagtatctatgttgtacagatgaagaaatttttacagatcatcagcaggatgattttgtgccgtatccggtgtgcgattccaatgatctggaatattatcgaatcaacggtctgtactatgaaacatttgatgagaatgaaatctatgaaaaaatgaaagcagggatagaacagggacaggaaatgtttgctatccgtttttcggaaaatgctgtttatgaagttgcaaaagagaaaattatagataatttgattccacaggcggcgcagtttcttgttgacttcagacaattagaagaggtgaaatatacgtatgccgtggatgacagaaagcggatcataatgatcttctggtattcataaaaatgcataaaacaccatttataagtaaaaaataccaatatatattaataaaagtactaagttattcatcaaaaatgatgttgaaatgtctctcatgctgtagtataatctttacaatttgagaaagagggcgctttggaataaagactccatgagcgccttccttttgagaaaaaatatttttacgaagggaaagggtgaacagatgaaagcgtttcttattttggaagacggtactgtgtttacaggaacaagcattggttcgacgagagatatgatcagtgagatcgtgtttaatacttcaatgacaggatatcttgaggtactgacggacccttcttatgcgggacaggcagtggttatgacatatccgctgattggtaattatggaattacaccggatatggagtcattaaaggcatggccagatggatatattgtgagggagttatctagaatgccaagtaacttcagatgtgaaggtacaattcaggatttcctcaagaaatatgatattccgggtattgcgggagttgatactcgtgctcttacaaagattttaagagaaaaaggtaccatgaatggtatgatcacaacaaacaagaattacgatcttgatgaagtaatctctaagttgaagaattataaggtagaaggtgttgtctccaaagttacatgtgaggagaaatacgttttagaaggaacaggtaagaaggttgcacttcttgatctcggagctaagaaaaacatcgcaaaatctttaaatgatcgcggctgcgaagtgaccgtttatccggccgatacaacagcggaggagatcatcgcatctaatccagatggcattatgctttccaatggacctggagatccggcagaatgtacatcaattatcaaagaaatcaaaaagctttatgaaacagatatcccaatatttgccatttgccttggacatcagttgatggcacttgcaacaggtggtacaacttacaaattaaaatacggacatcgcggaggaaatcatccggtgaaagatcttcagacaggcagagtctacatttcttcacagaatcacggctatgttgttgatgaagacaagattgatccaaacgttgcagttcctgcatttaagaatgtaaatgacggaacaaacgaaggacttgcatatgttggaaagaacatttttacagttcagttccatccggaagcatgcccgggaccacaggattcaggatacctgttcgatcgttttcttgagatgatgggaggagagaaataatgccaagagataatagtatcaaaaaagtattagttatcggttctggtccgatcgtcatcggacaggctgcggagttcgattatgctggaactcaggcctgccgttcactgaaagaagaagggattgaggttgtacttctcaactcaaaccctgcaacaatcatgacagataaagatatcgcagatcgtgtttatatcgagccactgacaattgaggttgttgagcagctgatcaaaaaggagaaaccagacagtgtacttccaacacttggaggacaggctggactgaaccttgcaatggaactcgaagaggctggattcttaaaagagaataatgtacgcctgatcggaacaacatctgagacaatcaagaaggcagaggaccgtctggaattcaaggcaacaatggagaagatcggtgagccggttgcagcttctctcgttgtagaaaatgtagaagatggacttgcatttgcaaataagatcggctatccggttgttcttcgtcctgcttatacactgggaggaagcggtggtggtatcgcgcatgattctcagcagttagtagagatccttgagaatggtcttcgtctttcccgtgttggtcaggttcttgttgaacgttgtatcgcaggatggaaagagatcgagtacgaggtaatgcgtgacggagcaggaaactgtattacagtatgtaatatggaaaatattgacccggttggagttcatacaggagacagtattgtagttgcaccatctcagacactgggcgataaagaatatcagatgttacgtacttccgcattgaacattatcagtgagttgaatatcacaggtggatgtaacgtacagtatgcattacacccagagacatttgaatattgtgtaatcgaggtaaaccctcgtgtaagccgttcttctgcacttgcttccaaagcaacaggatatccgattgcgaaggttgcagcgaagatcgcacttggatacaatctggatgagatcaagaatgcaatcacacagaagacctatgcaagttttgagccaatgcttgactatgtagtagttaagatcccgagacttccattcgataaattcatcagtgcaaagagaacgctgacaacacagatgaaagcaaccggagaagttatgagcatctgtaataactttgagggagctcttatgaaagcaatccgttctctggagcagcatgtagacagtctgatgtcttatgacttcacagatctgacagatgatgaactgatcgatcagctgaagaaagtagatgacatgcgtatgtggagaattgcagaagcatgcagaagaggaatctcttacgatctgatccacgagattacaaaagttgatgagtggtttatcgataaatttgcgatcatcacagagatggagacagctctgaagacacaggaacttacaccggagcttcttgcagaagcaaaacgtatcgagttcccggataatgtaatcgcacagctgacaggtaagacagagcaggaaattcacgatatgcgtcatgcaaacggtatcgttgcagcatataagatcgtagatacttgtgccgcagagtttgccgcagagacaccatactactactctgtatatggaagcgagaatgaagttgaacagacaaaagataagaagaaagtacttgttcttggatccggtccgatccgtatcggtcagggtatcgagttcgacttctgttctgtacattgtacatgggcatttgcaaaagacggatatgagacaatcattgtaaataataacccggagacagtaagtactgactttgacattgctgataagctgtacttcgagccactgacaccggaagatgtagagagtatcgttgatattgagaaaccggacggagcagttgtacagtttggtggacagacagcaatcaagctgacagaagcacttatgaagatgggagtaccgatccttggtacatctgcagagaatgtagacaaagccgaagaccgtgagctctttgatgagattcttgaagagtgcgagattccacgtccgacaggtggaacagtattcacagcagaggaagcgaaagaagttgcaaacagacttggatatccagtactggttcgtccttcctacgttcttggtggacagggaatgcagattgcaatcaacgacaatgatattgatgaattcatcggaattattaacagaatcgcacaggatcacccaatccttgtagataaataccttcagggaaaagagattgaggtcgatgcagtatgcgacggaacagatatcctgatcccgggtatcatggaacatatcgagcgtgcaggaatccactccggagacagtatttccgtatatccggcacagagcctgacagaaggagcaaaagcaaagattgctgagtatacaagaagacttgcaaaatcactccatgttatcggtatgatcaatatccagtttatcgtgtgcggcgaagatgatgtatatgtaatcgaagtaaacccacgttctagccgtacagtaccatatatcagtaaggtgacaggtatcccgattgttcctttggcaacacaggttatcacaggaaagaagatcaaggatcttggttacacaccgggacttcagccggaagctgattatgtagcggttaagatgccggtattctcctttgagaagatccgcggagctgatatcagccttggacctgagatgaagtctacaggagagtgtcttggaattgcaaagacatttgatgaagcactttacaaagcatttatcggagctggaatcaagcttccgaagcataagaacatgatcatgacagtccgtgacgaagaccatgcagatgcagtagagatcggaagaagatttgagaagattggataccatatctttgctacaagcggaacagcacgtgcgctgaatgaggcgggagtaaaggctactccggttcgtaagatcgagcaggaatcaccgaaccttcttgacctgatcctcggacataagattgatcttgttatcgatatcccggcacagggtgcagagcattcaagagatggatttgtaatccgtagaaatgcaatcgagacaggtgtgaatgtactgactgcaattgacacagcgtatgcactgatcacaagtcttgagaatacagatattaagaaactgtcactgatcgatattgcgaaggtgcagtaagataagagcaagaacagttaccgtatgtggtgcctgttcttgctcttctactatttctaatcttgcaaggtcaacgagtgaactgatttatataacaaaaaatggcgagggtgacggagtatttatgaatattgatgcctttgagaaaagggaacaggcattggaacttcgtgcgaaaatcatgcaggcagaagaagaaaggttaaacggagcaaagacaagaaatatctccgaagcaagaaaggaattgagagaacgtgcaggaacaatataaagttgaaattcttccgactgcatgggaagatttgaaaagtattgaggattatgttccgttcctgttcttcaacttccgtaattaaagagctgcttgtcactcctatataaacgaggtataatgaatttatcaataagcagtcttttcacacagtactttttgatagaatcaggactgcggaaaaggaggactcaaatatgaagatagacatgcactgtcacgtgaaagaggggtccatagacagcagggtagggattgaggaatatatcacgatactcaaggaacacggatttcagggaatggtgatcacggatcacgacacatataatggctaccgctactggaagaagaatttaaaaggaaagaaacataccgattttgtggtactcaaaggaattgaatatgatacgagagatgcagggcatattcttgtaattatgccggagggtgtaaagatgcgtctacttgagatgcgtggaatgccgcttgcacttctgatcgatttggttcatcgcaatggtggagttttgggaccggcacatccatgcggagaaaagtacatgagcttcactcatgcgagaagatactacctctcacctgagattgttaaacgattcgattttattgagacattcaattgttgtgaaccgaaggattctaatgctggtgccttaaaactggcagagaaatacggtaaggtgatgaccggtggaagtgattcccacaagacagactgtgtcggacgggcatatacaatcttacctgaaccggtcaaaacggagacagagctgatctctttgatccataagaagactgcattcaagacaggtggtgtctattataataagacgacaaaagagaagatagggaaggtaaataagctccttgtatattccttctgggtatacaacaagagcggtgagctgatgaaacgtcgtgggcggaataagaaaatggaagaagaacatccatttgatccgattgatccaatcgaactgtattatcactcataattgttttgggatagttactatgctttcctgtaagccccaggtgaaataccatattttcttttgaaaatgcggttaaagtaggacaggttgtcaaaaccactggcatcagcaatcatcagaatagagtcatcggatgatttgagaagtctggcagccattgtaagccggtaatcatttaagtattcagtgaatccgattcccatgtgggctttgaagaacttcatgaaatgggatttactataataagtaagttcagccatgtcatcaatcgttagtttttctgtataatgattttctacgtattttaaaacagttttcattttctccaaagatttggaattggaggaagtggagactgtttttttctgacgttcagagatcagaagaaagaaaaagttaaacagggaacttttcacagcaagctgccatccaggtgtctgatcagcgcagacaaggtcaatctgtcggatacaattgcttaaggcttcaaaagatccgagagctggagtgagaaaatattcaataggaagagaaccatcaagaagcggaacgatgtattgaatcatgcacagatcgtttgctccggaagaaagtaaatctggtttgaaaataatattttcatattccattttaaaagtatcatcctgttcgatggcatggagacatccagggggaataataataatatctccactgtgaaccagacgcttatcaaagtccacagaaacaaaaccctgccctcttttgatgacaacaagttccaactcatcgtgccagtgcagtggtactccagggaaatcgagagggatcgagcagagataagtattataaggaaattctgcggatgtatgcgcttttgtttcatgataattctgatattcgttaatgttcatataaaaatgagatcctttcaataaaatgatatctgacacacctgctggtcaaactagattgaattataagaatgatagtattgtacaataaagtgcaagtatattgcaagatatttgaagataatcgtattaaaatacaatcataagttgaaaacaaagaaacaaagtatgtaacataaaaacagaatcagatttgaagggagattattcaaatgaacattcaggaaacattacagcagaaacttggtaaagagattgcacaggcttccaatgaagaaatctacggagcacttcttagtatggtgcaggaaatggcaggagaaaaggaacgtacagatagtaagaaaaaactttactatatttccgcagagttcttgatcggaaaactgctttctaacaacatgattaaccttggtatctttaatgaagtaaaagatgtacttgcacagaacggtaagaatattgcagaaatcgaagaagtagagccagagccgtcacttggtaatggtggacttggacgactggcagcatgtttccttgattcaatcgcaacacttggacttgcaggagacggtgtcggactgaactatcatcttggacttttcaaacaggagtttaaaaataaccttcagagagaaactccgaatccatggattgaagaaaaatcctggctgaaaaagacagatgttgtttatccggtatctttcaaaggacttaatgtaaatgcgagaatgtatgatattgaagtaacaggatataacaataagacaaataaattacatctctttgatattgactctgtagatgagacaattgtagaggatggaattgcttttaataaagaagacatcgagaagaacctgacacttttcttatatccggatgacagtgatgagaacggaagactgcttcgaatttatcagcagtatttcatggtaagcgcaggtgcacagctgattcttgatgaatgtacagcaaagggatgcaaccttcatgatcttgcggattatgcagtgatccagattaatgatactcatccgacaatggtaattccagaactgattcgtcttcttgtagagagaggcttagacatggatgaggcaatcgaagttgtttctaagacatgtgcatatacaaaccatacaatccttgcagaagcactggaaaaatggcctgtatattacctgaagaaggtagttccgcagctgatgccgatcatcgaagtattggatgataaagtaagaagaaaatatgaagatgaaagtgtttctatcattgacagaaatgatacagttcatatggcacatattgatatccattatggattcagcgtaaatggtgttgcttctcttcatacagagattctgaaagagacagaactgaataacttctacaagatttatccggagaagtttaacaataagacaaacggtattacattccgtcgctggttactgcattgtaatccgactctcacagagcttcttgatgaactgatcggagagggatacaagaaagatgcagcagaacttgagaaacttcttgcatttaaggatgatgataaggttctcgacagattagtagagatcaaacatgcaaataaagaggcactgtgcaaatatctggaagagacacagggagtaaaagtaagccctgatacaatctttgatattcagatcaaacgtctgcacgagtacaaacgtcagcagctgaatgcattatatatcattgataaatatcttgagatcaaagcaggaaagattccggctgcaccagtgacagcaatctttggagcgaaggcagcaccggcttatgtaatcgcaaaagatattattcacctgattctctgcctgcaggagattatcaacaatgatccagaggtaagtccatacctgaaggttgttatggttgagaactataatgtaacaaaggctgaaaaattaattccggcttgtgatatttccgagcagatttcacttgcatctaaagaagccagtggaacaggtaatatgaaattcatgctgaacggagctgtaacactcggaacagaggatggagcaaatgttgagattcatgaactcgttggaaacgataacatttttgtattcggtgcttccagcgatgaagtaatcgagcattatgcaaaggctgattatgtcgcaagagatttctatgagaagaatcctgcgatcaaggcagcaattgactttattacaagcgaggaagttctgaaagttggagagaaagagaatcttgagagactgcagcatgagattatcagtaaagactggttcatgactcttcttgacttcgacagctataaagaaaagaaagaagaagcattgagagcttatgcagatcagaaaacatgggctaagaaagcacttgtaaatattgcgaaagcagggtatttctcatctgacagaacaatcgaagagtacaacagagatatctggcatctgtaagaggaggagaagaacgtgaaaagagcgagcggagtattattaccggtattttcattgccatcaaaatacggaattggctgtttctcaaaagaggcgtataaatttattgatcagttaaaagaggctggacagagttactggcagattctgccgcttggaccgactggatacggggattccccgtaccagtctttctccacatatgctggaaatccatattttattgatctgaagacactgatcaaagaaggacttctgacaaaaaaagaatgtaaagtgtatgattttggagagcaggcagacagtattgattacgagaaaatctacaattcaagatttaaagtgctgaaaaaggcatttgagcgtttcgaaaaagatgaagcatatgataactttatcaaagaaaatgcgtattggctggatgattatagtctttacatggcaatcaaggacagcaaaggtggaatcagctggaatgaatgggaagaagccctgaaaaaccgcgaggaagcagcacttgagaatgcgagagaagaacttgcagaaaagattgatttttacaaattccagcagtatgaattcgataaacagtggtcacagcttcacgcttatgcaaatgaacagggaattcagatcgttggagatattccgatttatgttgcatttgacggtgcagatacatgggcatctccggagttattccagtttgatgaagagaataatccggtggcagtagcaggatgtcctccggatgatttttctgcaacgggacagttgtggggcaatccgctgtataattgggaatatcataaaaagacagaatacgactggtggattaagagaatccgtcattgtctcaaattatatgatgtagtaagaattgatcatttccgtggatttgatgaatattattccattccttatggaaatgagacagcagtggatggaacatggatgcctggcccgggaatggatctgttccgtacaattgaagaaaaacttggcaaattgaatattattgcagaagaccttggattcctgacagaaagtgtacttcagatgctatccgacagtggattcccgggaatgaaagtaatacagtttgcatttgatccaaatggaggctctgcatatctcccgcataattatccggaaaacagtgttgtatatacgggtacgcatgacaatgatacaacaagaggatggtatcacagtacagataaagcaacgcgagactttgcaaaagagtatatgaatgcacaacgcctggatgaagatgatctggcgtgggatttcatccgacttgcaatgagcagcaaggcgaacctttgcgtaactccgatgcaggacttactgaacctggatggtaaggcaagaatcaatgtaccgtctacacttggcggaaactggacctggagaatggagaaggggcagtttgatgaagagacggtaaagagattgaaacgtatgacatggttgtacgaacgtcttccgagagaagttgaaatagggctaccgcaatcccactggctttagacggtgggttaaggtagctaaaaatcagaaattattgtatactcatggcatgggaacatggaaatctaaaaacagacacaaatacctattacaatatcacattatttttgtctgcaaatatagaaagaaattactggtttcgaggcagatatcagatgatataaaacagttttcgtatgagatatgtcagagacacagtgtgataataagatatatggaaaagatatcctcaatatttacgaaaacaattctggaaagaacataccttttggacagatggatattttgcctgtagtgtaggaaatgtatcggaagaaatgctgaaaagatatatagaaaattaaggttgggaaagagggtgacagtggatgttaaaggcatataaatacagaatataccctaataatgagcagaaaatacagattgcaaaaacatttggctgttgccgttttgtgtataatcagaccctggtataccggaaagaagtatatgagaaagagaaaaaatcagttagtaaaaccgactgtaacaattactgcaacagacaattaaagaaagaatatgaatggctgaaagaagtggataaatttgctctgacaaatgcgatttacaacatggatgctgcataccagaaattttttaaggaacatgcaggttatccgaagtttaagagtaaacacgataatcgtaagtcatatacaacaaattttacgaatggcaatataacagtagatttcgggtataatagagtaaaactgcctaaattaaaaggtataaaagcaaaactgcatagaaattttagcgggcagataaaatcggcaacgatatcacaagttccgagtggaaaatattatgtatcaattttagtggaaacagaacacacggaactgccacatacaaatcaaaataccggaatagatttaggtattaaggagttatgtattacttctgatggaaaaaaatacgaaaatccaaaaatcatcagaaaatacgaaaagaaactggtgaaactgcaaaggcagttagcccataaagagaaaagaagtcaaaattactacaaaacaaagaaaaagatagcattatgccatgagaaaataacaaataccagaaaagattatctgcacaagatgtcacatgagattatcagcgaaaaccaagtgatagtttcggaagatttgcagataaaaaacatggtaaaaaatcatcatttggcaaagtctataagtgatgtatcatggcatgagctgacaagacagttagaatataaggcaaagtggaatggcagaaaatatgtcaaaatagatacattctatgccagtagtcaattgtgttcagtctgtggataccaaaatacagagacgaaaaatctatcagtaagggaatggatatgtcctgtctgtggaacaaatcatgacagggatatcaatgcagcaaagaatatactggaagaaggattaagacaaatagcataaaaataacaatatagggcagggactgtccaaattaacgcctgtggagatagtaggttgcgaggtctgcgaagcaggaagcccattggctttagacaatgggtagttcacaagaaaataaaatagtacaagagagggactgtgttgaacatggtctcttttgttttttgagtgttatgtaagtactgcatttgcgcccgctggcgatcgcaaatgcgttttacaacggccgttcaactttgcatttcggccgttttgctccgcaaacccggccgatggggtgcgccatatgcacaagtacttttgacttgtttttgtatttacagagattaacctatattattcacggctatgccgtgtgaagtggctgaaagccacatgattactgtattttaattgaatattgctgtttcacctatcaagtgaataaaaaaagagcatccatttgtggtaaaattaaggtgtcgaatcttaaataataacccaaaggagccctttatgagtattgtaaacaccttatcactagaaagcaatagacagattaaaataaattttgatggaggagatttatcctccgatgcaggcttacttcttatcaaagaattcgtaagcaaacttggccttgataaacttttcagtcactcatttaagaccaatgattctgcatcatttagatatcacactgacaaggagaatctccttcagatgatatatatgatcattgcaggttactttgaagatgatgcttcagatgaacttacaaatgatccagtatttaaagcagtgctaaataaagatgctttagcttcacaacctacggtatcaagattctttaatcgtatggatgaagatactttaaaccaattccttacaattggcagaatacttcgaaaaagagtttacagtgttcagatgccacaggctgtcattttggatttggattccactcttcttgatgcatacggtaaacaggaagcgcagagcctttaacgttcattatcaaagcaatggataccatccgcttgtctgttatgatggattgaccggggatttgataaaaatccaacttcgtgatggaacacagtattcctgcactggagtggttgatttcttgcaaccaatacttgatgaatatctgaatgattatccgtcaatccgaattctgcttcgtggtgatagcggttttgctacacctggcctttacaagcagtgcgaggaaaatggcacaaactatgtaatccggctgaaggagaatggtattctccgtggaaaagcatcccatcttgtggatgagcttgatgaaatcactagaaataacaaagtcgattatgcagtagtttatggtgaattcatgtacaaagctggtccatggccttatggaagacgtgtagtatgcaaggttgaaaagccggaaaaccagatggtttacatgtacacattcattgtcacaaacatggattcatcaccagagtatcttatcaaattttactgtaagcgaggactgatggaaaactttatcaaagagagtaaatctggttttgattttgcttccgtaagcagtcatacccgaattgtaaatgccaacagacttcaagtacacgctcttgcgtataacatatttaattggtttagacgattggcgttatcagcaaatatgcgaaagcaacgtattgataccgtccgtttaaaactgctgaagattgctgtaaaagtagttcgttcagcaagatatatcacattcaagctttgcagtagttgcccttataagagtgaattctataagacaatttttaatatcggcaagctaaatgtacagctggaatagcacctattaacgaaccttgacagtttaacaattgctctgaactctgcgatagagactttgcgcccttttgacaggaaaattgagcgatgttatgactgcatggagcatttttaatttcatggtacagttatcagttcagatattgttccatgaataattcaggattaagtcatatttaaatgggaatattgctgaccagattctgagtttgctaagtctgagtcatagatagatgggaatatcattgactagggttgatatttcgagaacttgggtcaagatcatgtagagaatcttaggacttgtttttgcaattcaaaaaattaggtcatctcatttatgaacacagattacgcatctgcggcaaccgaaagaactgacgtcctttcggttaagggcattcgccctatgttccccaaccctatcagcttgttacaagcaagcttgtaaaacctgttagtgtttgggacgcagacactaattttcagaatattctgaattgcatgaaatatataaaaaacattgacaattaaaaaaggctatgataagataacattcgtcgctgagaacagcactgaaaactacagaacagacgcttgattaagaggaaggcgcggaggcggacagtcccttagaaagaaacagttcaaagaaaagatttataagtgaagatgataaaaacttataagaaattctaaaaagtagttgacaggaaagtttgaatgtgatagcataaatatactgcaagcgagaagcaaccaagcaaatcgagcagtaaagaaaaataaaaaagttcttgacaaagacaaaagcttttgataaaatataaaagctgtcgcttgaaaagaacgacacaaaccaagaaccttgataactgaacaatagacaacaacaacccttgaaaatttctttaagagaaaaattcaaagaacggtttttaaacaaaccaaaacaacagtaaaaagggaagaattagctagttagttgattctgaactggatacaaacacttttaacgagagtttgatcctggctcaggatgaacgctggcggcgtgcttaacacatgcaagtcgaacgaagcaccttgatctgattcttcggatgaagatcaaggtgactgagtggcggacgggtgagtaacgcgtgggtaacctgcctcatacagggggataacagttagaaatgactgctaataccgcataagaccacagcaccgcatggtgcaggggtaaaaactccggtggtatgagatggacccgcgtctgattaggtagttggtggggtaacggcctaccaagccgacgatcagtagccgacctgagagggtgaccggccacattgggactgagacacggcccaaactcctacgggaggcagcagtggggaatattgcacaatgggggaaaccctgatgcagcgacgccgcgtgagcgatgaagtatttcggtatgtaaagctctatcagcagggaagaaaatgacggtacctgactaagaagcaccggctaaatacgtgccagcagccgcggtaatacgtatggtgcaagcgttatccggatttactgggtgtaaagggagcgtagacggagtggcaagtctgatgtgaaaacccggggctcaaccccgggactgcattggaaactgtcaatctagagtaccggagaggtaagcggaattcctagtgtagcggtgaaatgcgtagatattaggaggaacaccagtggcgaaggcggcttactggacggtaactgacgttgaggctcgaaagcgtggggagcaaacaggattagataccctggtagtccacgccgtaaacgatgactactaggtgtcgggcagcaaagctgttcggtatgccgcagcaaacgcaataagtagtccacctggggagtacgttcgcaagaatgaaactcaaaggaattgacggggacccgcacaagcggtggagcatgtggtttaattcgaagcaacgcgaagaaccttacctgctcttgacatctccctgaccggcaagtaatgttgcctttccttcgggacagggatgacaggtggtgcatggttgtcgtcagctcgtgtcgtgagatgttgggttaagtcccgcaacgagcgcaacccctatctttagtagccagcggttcggccgggcactctagagagactgccagggataacctggaggaaggtggggatgacgtcaaatcatcatgccccttatgagcagggctacacacgtgctacaatggcgtaaacaaagggaggcagaaccgcgaggtcgagcaaatcccaaaaataacgtctcagttcggattgtagtctgcaactcgactacatgaagctggaatcgctagtaatcgcgaatcagaatgtcgcggtgaatacgttcccgggtcttgtacacaccgcccgtcacaccatgggagtcagtaacgcccgaagtcagtgacccaaccgtaaggagggagctgccgaagcgtgggaccgataactggggtgaagtcgtaacaaggtagccgtatcgggaagcgtgcggctggatcacctcctttctaaggaagaaaaaagtagagagtttttactgttgtctattgttgggttatcaagtaacctgaactttttggtggcgatgcgcttaggggtaacacccgttcccatcccgaacacgatggtaaagacctaagcggccgatggtactgcactggagacggtgtgggagagtaggtggccgccaaattaaaaagaaaataaaccgagaggttctgcgataaagctggtcttcaccagtgatcagagtttaaaagaaagcttttagtctctgatgactgatgaaaaagtcagtcagatgaagaactgaataaggacttcatcttatgtaccttgaaaactgcatatagtaaaaatcaatagatttagataaatatctaatcaagacatccgaggtaatgttaacaacattaacttacagtctgaagaaaacagacttaaaataaattgactatcaccaacgcatacaacgctatgtatgtgtggacattatcccattcccgtgggatgaggtcgagttggttatgctgataagagcgtatggtggatgccttggcactaagagccgatgaaagacgtgataagctgcgaaaagcttcggggaggagcaaatatcctttgatccggagatttctgaatggggaaacctacttgagcaaacctcaagtatccttaagccaatacataacttaaggaaggaagccggtgaactgaaacatctaagtagccggaggaagagaaaacaacatgtgattctgtgagtagcggcgagcgaaaacggaagagcccaaaccagcgtgcgtgcatgctggggttcggaccgcggaattgattcaacgagtttagcagaacggttttgggaaagccggccagagagggtgaaagccccgtaagcgaaagacgagttgacatggcgggatccagagtaccacgagacacgtggagccttgtgggaagatgcggggaataccccgtaaggctaaatactacttagtgaccgatagcgcatagtactgtggaaggaaaggtgaaaaggaccccgggaggggagtgaaaaagaacctgaaaccatatgtttacaagctgtggaagagctttatatgctcaaccgcgtactttttgtagaacggtccggcgagttacgctggctggcgaggttaaggactgaaggtccggagtaagaggaaaccaagtctgaacagggcgcatagtcagtcggagtagacccgaaaccgggtgatctatccatgtccaggttgaagttgccgtaaaaggcaatggaggaccgaacccacatccgttgaaaagggtggggatgaggtgtggataggggagaaattccaatcgaacccggagatagctggttctcctcgaaatagctttagggctagcctcatacgagtcttgcggaggtagagcactgaattcctaagggggcgtcaaagcttactaagggatatcaaactccgaatgccgtgtagatgatgtatgggagtcagacgatccgagataagttgggtggtcaaaagggaaagagcccagaccaacagctaaggccccaaaatgtgtgttaagtggaaaaggatgtgggatttcgaagacaactaggatgttggctcagaagcagccattcattcaaagagtgcgtaatagctcactagtcgagaggtcctgcgccgaaaatgtccggggctaaaacacactgccgaagctttggaattgaattaattcaattggtagaggagcattcttaaagggacgaagcagtaccgtaaggagctgtggacttttaagaagagagaatgccggaatgagtagcgagaggaaggtgggaatccttccggccgaatatctaaggtttccagagtaaagctgatctgctctgggtaagtcggggcctaaggcgaggtcgaaagacgtagtcgatggataacaggttgaaattcctgtactatcctgtaacagaactgtggggacacaggcagagagcgtgagccgggaatggaaagaccggtacaagcgaggtaggagtctggttggcaaatccgccaggcaatctgaagacgtgatgtggactgaaaataagtagggaagcacgtgagctgactgtcaagaaaagccgctattgtttgcaggatacccgtaccgtaaaccgacacaggtggatgaggagagaatcctaaggccgacgggagaagcattgttaaggaactcggcaaaatgactccgtaacttcgggagaaggagtgccagtaagatggccgcagagaattggcccaagcaactgtttagcaaaaacacaggtctatgcaaaaccgaaaggtgaggtatatgggttgacgcctgcccggtgctggaaggttaaggggagaggttagcgcaagcgaagctttgaacttaagccccagtaaacggcggccgtaactataacggtcctaaggtagcgaaattccttgtcgggtaagttccgacccgcacgaaaggcgtaatgatttgggcactgtctcaacaatgcacccggtgaaattgaaataccagtgaagatgctggttacctgcgccaggacggaaagaccccatggagctttactccagcttgatactgggattcggtattgcatgtacaggataggtgggaggctaggaaatggtaacgccagttgccatggagccattgttgggataccacccttgcagtactgggtttctaaccagcagccgtgatccggctgggggacaatgtcaggtggggagtttgactggggcggtcgcctccgaaagggtatcggaggcgctcaaaggttccctcagaatggttggaaaccattcgaagagtgcaaaggcagaagggagcttgactgcgacaccgacgggtggagcaggtacgaaagtaggacttagtgatccggtggtataaagtgggattgccatcgctcaacggataaaagctaccctggggataacaggcttatcactcccaagagttcacatcgacggagtggtttggcacctcgatgtcggctcatcgcatcctggggctgaagtaggtcccaagggttgggctgttcgcccattaaagcggtacgcgagctgggttcagaacgtcgtgagacagttcggtccctatccggcgtgggcgtaagatatttgagaggagctgtccttagtacgagaggaccgggatggactggccgctggtgtatctgttgtcttaccaaaggcatagcagagtagccaagccgggaagggataaacgctgaaggcatctaagcgtgaagcccccctcaagatgagatatctcataacgtcaagttagtaagaccccttgaagacgacgaggtagatagggcagaggtggaagtgtggtaacacatggagctgactgttactaataggtcgagggcataaccaaagcagtgataggtttggatgatgatgttggttttgactgtatgtagttttgaaggtacatggaatatagacaggaatgagaagcagtgcgaaagcgctgtttttttattgaacaatttgagttcataatgaaaagcactggcagagtggaaattggaacaccaatgtaaaaaaccagtttaatagtagtagtaaaaagaaagaaatcgataggagcatatcactatcgaaggatcagggatgatctggaacgatatcatggtattgatgtaaacgataaacgtgtgctacgcatttgccgtaaacttaatataaaatcaactatcaagtattctaacaacgggtgcacaagacaggctgcaagccctcagtatatagctgaaaacatacttaatcgcgagttcactgccaaagcaccaaatgagaaatggctcactgatgtgacagaattccattattatattgggatggaaaagcgtaaagtttatctaagtgcaatactggatctatatgatagacggattgtttcgtatgttattcgtgataagaacaacaatgctttggtgtttgatacggtagacaatgctttacttagaaatcctggtgcgcagccactgtttcacagtgacaggggatttcaatatacaaacaggctatttcatacaaaacttataaatgctggaataacgcaaagcatgtcgcgagttgctaaatgtatcgacaatggaccaatggaaggcttttggggaattctgaagagagagcgatactatggaaaacgattcactgatagaggtactctcgtaaaaatgatcgaagattatatagattactacaacaataaacgcttgcaaaggaatctcggaattttaacaccaatggaaaaacacaaaatttacttgcaagctgcataaaactgccagcagataatttctactggcaggaaaaatttatattttttcaattgtctacttgacggggagcagttcaaagcgacagcccctgtcggtttcttttattaagtttattctatttcaagtttactttgtcaaatcttccaagataactatttgatcatccttagaaatgcttcgtgtattcttgtatcttgatctaattctggatggaatgcaaatgcaatctgattcttatatttcactccgacaatacgatcctgtacgatactgaggatctcaggtgtatttccggacgtgtctgtatgaacagattctacataaggtgctcggatgaaagtcataggaatttcaccgataccggctgcttcagcatttgtatggaagcttccaagctggcgaccgtaggcgtttcgtttgactgtcataggaatggtttcaaaataggtttcgtcttgttcagcaatgtcagaagccaggagaatcattccggcacaagtagccagaacgggaataccggattcaatcttctcttttaaaggttctaacatgttaagatcatgtaagagttttccctgaacggtgctttcgccgccgggaaggataatcccatcaaaatctttttgcagatcagaagcctgtcggagttcaatggtatgaactccaaacttttgaagcatctgttcgtgttctatgaatgctccttgaagggcaagtactgcgattgtcattttattttcctctttctgccatgagaagttcaatttcctgttcgttgatgccgaccatagcttcaccaaggtcagatgaaagttcagcgatcagttttgcatctgtatagtttgtaacggcctgtacgatagcagcagcacgtttcgctggatttccggatttgaagataccggaaccgacaaagactccctctgcgcctaactgcatcataagagcggcatcagcaggagttgcaacaccgccggcagcaaagtttacaacaggaagttttccgtttttatgtacataaaggacaagatcataaggaacctgcaactgtttggctgcctcgaaaagttcatcttcacgcatacttactagtttggaaatttcactgttcattttgcgcatatggcgaactgcctgaacaatatcaccggttcccggttcaccttttgtacggatcatagaagctccttcattgatacgtctgagtgcttcgccaagatcttttgcaccgcagacaaatggaacatcaaactctcttttgttaatatggtagacatcatctgcaggtgaaaggacttcgctttcatcaatatagtcgatttcaattgcctgaagtacctgagcttctgcaaaatgtccgattctgcatttggccataacagggattgaaacagcttcctggattcctttgatcatcttcgggtcactcatacgggaaactccaccagcagcgcggatgtcagccggaattctttccagcgccataacagcacatgcaccggcagcttctgcaatctttgcctgttccggagttgtaacatccatgatcactccaccttttaacatctgtgccagatttttattcaattcataacgttcattatttgtactcatttttaaatctccttttctttactaattcgataggtaatagtataatgacaaagtgactatataaaaatactcagttttaatatattcaaaaaggtcagagtggagaaaaaagtaaatatgttgacgtataattttgaaaatatagggtcagatacgctttatcaatatttgtataaatgtatcaaaaatgacattattcaagggaaaattaagagtggagaaaaacttccatcaaagcgtgcacttgcaaaaaatctggctataagtgtaattacagtagaaaatgcttatgggcagcttgcagcagagggatatatttattctgttccaaagagtggattttatgtggcagatctgcgggatgacagaatgaaaagcgagagtggtttatcagaaaataggatttacagcaataagttaaaccttaccggtggaaagaatgcttatatcgcagattttacgagtaatcagacggaacagagtgcatttccattttctatttggacaaagacgatgcgggcagtaatgaatgactatcagactgaattgatgcttaatccaccgtgtggcggagtaatggaattaagacaaagcattgcggattatctgaaagcattccgaaacatgacggtgcggccggaacagatcattattggtgctggaacagaatatttgtccagtcttttgattcagcttttgggaaaggaattgaaatattcagttgaaaatccgggatatcataaaatcgcaaaaatttatcgcagtatgggagcttgttatgagtatatagaaatagaagaggacggaccgaaggtagaagaactggaagaaaaagaaatcaatgtgatacattgttctccatcgcatcattatccaaccggaagggtaatgccaatcagtaaacgttatgagttacttggctgggtgacaaaaacgaaagatagatatattatagaagatgaatatgacagtgaacttagattgaatggtaagccaattccatcacttcagagcattgatgtatcgggaaaagtgatttatatgaatacattttccaagactttgtgttcaacagtgcgaatcagttatatggtgctgccggatgaattggcagaacgattttacagagaactttctttttattcctgtacggtatcaaattttgaacaatatacgttagcgcagtttatgaattcaggggcatttgagaaacatattaaccggctgcgtaattattatcagcagaagagagacaggatcttggaagcatttttacaaggagcattgaaaactaaaattaagattctggaagaagatgcaggagtacattttttaatgaaagtagatacaaacctgagtgaagaggaatttctggataaaatgaagagcaaaggaattaagctggctgcattgtcatcctattatcattcaagtgagaagaagaaaaagtatgaaaatatttatgttatgaattattcatttgttgattgtgaaaaaatggaatatgttgcaaagatgataacacaagtggaatgacatggagaaaagtatggagggagaaagataaaatgactttgcgaaagaagttaatgctctctttatttgctcaaccgtggaatggcactggcaagtgcgtacgatttgatttataatgtatgtggaaagcatagactgcggtagaagtataactgaaactaagagaggagtggaagtatcatgaaaacacttgtaaaaaatggaatgatcgtatcaccggaggacacttatgaagcagatgtcctgattgaggatggtgtgatcgaatgtatcggaaagaacctggaagcaaaatttggggatgcagataaggtgatcgatgcgaaaggaaaatatgttctcccgggaggtattgatgttcatacgcatatggatattgatgtcggaatcgcgagagcagtagatgatttttatacaggtactgttgcagccgcatgcggcggaactacaacgatcgtagaccatatgggattcggaccggcaggatgcccactacatcatcaactggatgtatatcatggactggcagacgataaagctgttatcgattatggattccatggagtagttcagcatgtagacgagtctattttaaatgaacttgagacaatgatggatgacggagtccagagcacaaaggtttatatgacttatggctataagattgatgatgatggtattttagaagttcttaagaagatgaaagaactgcatggaatcacagcattccattgcgagaatcattatgtggtagagcatctgaagaaagaatatggtgatgccggaaagactgcgccgatctatcatgcaaagagcaggccaaatcttgcagaagcagaggctgtaagaagagtcctttatcttgcgaagcttgcaggtgatgcaccggtgtatattgtacatctttcttgtaaggaaagtcttgaagcagttgaagaagcaagaagaaacggacaaaaaaacatttttgttgagacatgtacacagtatctgacacttacagaagacagatataaagatccggatggattgaaatatattatgtctccaccgcttcgtacacagcaggatcttgatgcgctgtggaaaggattagaggcaggagagattcagatcgttgcgacagatcattgtccattcaattatgcaaaagagaaacaggacggcaaggatgatttcagaaaatgtccgaatggagctccgggagttgaagaaagaatgattcttcttttctcagaaggtgtaatgaaaaacaaaatcagcatcaacaagctggtagaagttgcctgtacaaatccggcaaaggtgtacggaatgtatcctaagaagggaattattgaaccgggggcagacggagatcttatcattattgatgcagatgcaaaacagactctgacacatgagatgatgcacggagcagttgattacacttcctacgaaggaacaccattgaatggaaagatcgaccttgtaatgcagagaggaaatattattgccgaaaacaacgaattcaaaggaaatcgtggggacggtcagtatatttacagaaaaccatacttcgatatttaaggagaacgatatatttttaagaagtttttactgaaacttctgactagaataaaggacgcaaggtagagagagctgatgtctgtaacaagcttcgcacttccttgcgtccttatttatttgagtttttattttttatatcttagatcagatgcgtactttccaatttctccataaatgcctcattcatcttgatgatcggttttctaagaagtagtccaagcaacagtgaaggaacgaggtagattgccagttttccaatttctgctgcataggttgttccgtagaatcctgcaatacattcacgcatcgcattcatgctgtgtgtgaacggcagaagtggataaacaacctggaaaaacttcggtgcacactggatcgggaatgttccaccacttcctgcaacctgcattaccatcaggacaacggcaattgctttaccgatatctccaaaggagacagtcagtgcatagatcagattcacatagacaaagcttgtgaacataccggttagtacaaacattaccggatgcttacactgaataccaaggaagaaaagatctccaagacagatgagtgcactttgcatgaaaccgataatgatcagaagtaggatacgtccgatatagagctgatattctttcggatggaatagtatcttctttgtagaatcagctacagtgacttttagcatggcagccataacaacagcacctacccagatcgcaagagtggagtagaatggagccattgcagatccgtaattttcaattggataaatctttttctcatccagtttgaccggagaggagaggaaagatgaaatcgtttcagagtcttcggataacaggtttgttacggcagccataccttctgaatcatcagtggaaagttttgtagctacagccgtcagcttttcagaagattcttttagcagagcagcagaattagtaagtgctgtctgaagtcctgtaagtccgctggaagcagagccagtaacgttagcaatattttcaatgctgctgtcaaggcttccaagcatagaggagacagaacctgttgtagaactcaatgaattggaaagattatcaagatttccttttacattttgttcgtaagttgtctcgactgctttgacagaagaggttgcttcgctgatcagactatcaagttcactctttaatgtagtggcatttgcagttgctgtagtgatcgaagttgcagcaccgttaattttatcacggagtgcagtctgtcgttcaattgccagctgaatctgctgattgattccattgaccgcattttgaatctcaggataatctgaggaggcgtctgcaatagcagataatgcagcagaaagctgattatacccgtcaatgacattttgtacgcggctacttacggaagacaatgcatttgctgccgcctgtgcatctgagttgtaggaacttaaagccttgtcaatagtatcagagacagcggtgtagaagcttgcattctgtgctaatgcgtcagaaatcgtgcttgtagttccggacagggcagcagttaatgaatcaattccggaatcagaattctttaaggaattgaggctggtttttgtgccggaaccggtttcctgaagaaattctgttgttgtgttcagcattgtaactgcagagtttgtcatgtctgagaaggactgaacagttgcagcaacagttccaagatcagatcccatctgattcaaattactactcatattgttgatcagagaatcatcacctgtcttctttgcgattgaatctaccgtctgaaatgcatcaagtgcggtctgggcaattgtctcaatgaatgtctgattaatctgtttctggacagccgttgcgccttttccggtaatgatcggagcaattgcattttctttttcattttcataataagtcagatccggatgttcagcttcagaagagaagacactcatcattttctggctaaagtcttcagggattacgatcgcagcataatattctccggattttacacctttttgagcatcttttgaattagtaaaaacccagttgaactgagaatttttatgcagagaagagaggatctgctctcccatgttgatctttacggcaataagatcactttcataccctttatcatcacttgcaactgcaagtttcagcgcacctgtatttccgtaaggatcccagcttgcggaaatgttaaaccatgcataaagagtcggaattacagtgattcccataataacgatcattgcaatgacatttttctggatcttcatcagatcatttttcaggattaaaaaaatatttttcaaattattccgcctcctttccacggaagttttcaagcatttcttcgtaagacataccggcaagctttttctgttcttctaattttgtatgaatgtattctacaacgatcaaccatactgaaatcgcaatgatggaaatgatccataaagtcaggaatacaatctttgattcgagactgaacatcaggatcaggaagatcagagggatgatcgcaatggcaaggaagccgatgcgaatcatcttacggtaattgttttcaaatttctgtgcccgttcagctgttacaaggcgaaggtcttcgatggaaagagatgcctgtaagagcatggagagctgtgtacttctgctaagttctgcttcgtgaggttcgcacatcataaattctgtttctgccagtttcttgtcgaacagatggttcagtccggaaagagccgggcgcagtccaagtccaataagcagagagatcggcacgtagcacaggagcaggatcagaagatcgttgcggaagttagaaccgtagaaaccggcaattgcttcacgcatagcattcacaccatatgtaaatggaaggagtggatgcagtttctggaaaaaggctggtgtcatctcaatcgggtaggttccggaagaaccaggaatctgcaggattacgagaataacacagagcgctttaccaatatgcttaaatgtaagtgacagtgcataaataatatttacatagacgaaagagcaaaccattcctgtcaggatgaattgtgccggatgattgcattggactcctggaaggagtgtatcaccaaggcagacgataaatccctgaacaagaccaactgccatgtataagagccagcgtccaaagtataatgttgtctgtccgtaaccgcgcatggattcgtctttgtccacttccatcttaaagattgcgatcagtacgataccgccgacccagattgcaagattagagtagaacggtgtcatagaagaaccgtaattatctacggcataataagtctccgttttaatctccacaggagaggacataaatgatgagatagattctgcatcaatgccttcaagagagagcagtttttggtatgtagcagagcctgtcagtgcattcagatccgtctgaattgtacttagtttgtcgcttacggcacttaaagattccttcgtactgtcaaggagggcagttgtatttgacaatccactctctaactggtcgagcatatcattgatctgcttagaagtagctggtactccgtttagcagtccttctacctgaccggtcaatgtggaaaatgtatccagtgtctgtccaagcagtggaagaatattctggtcaaatgtagaacggaaagtatgtaagttattgatactttcttttgtcagagaagtaagctgttcctgtgttgcagttgttgtatcaatcgcatctttgattccattatttccagtctgaagactattgatcaattcctgatttgactggttctgagtttgcagggcagaaatctgtgcattgatctgatctccgatcgttcccggaaacttattggcaagttcctgcatttttttaagaatatctgcattcagttcattgactgagtttgcataaccaagcgcatcactgacagaagtgttgatctttccggctgcggtagcaagttctgtcagtcctgtggatgctgagctgcttgcctgaccaagtaaaagttctccgtcagagagggacttagaaagtgcggaagaaaaatctccggcagaagaacgtgtcgtattcatgacagagtcagcactggacaatgcatttgctccggatgttgctacatctcctaaagatgtagatgcatcttttgcattttctatcagctttgaggtattggatgagtctttactgaatttttctagaagctgttcgtattctttgatattattatttgcttttgtaagcagatcattaatctctgcatttgttgaatcaacagagtcggaaatgttgaatacagaatcctttaaaatctcggcaattgtctcagatgcaacagaggaaaaggtgttattaacctgtgtctggatcgtgcttgcacctgaactggtgatctttggcgcaattgcattgagtttttcattgatatagtattcaagttccggagtttcgatctttccggacaggacacttagcagggattcgctaaaatcttgcggaataatgattgctgcataatattcaccggatttaactcctttaatagcagcatctttggaaacaaacgtccatcctaattggtcgttttcctttagttggtcaatgatctggctgccggcattgatcgtcagatcatcatgtgtggcatcggtgtccagatttgctactgctaccttgatgccggaagtattggcataaggatcgatatttgctgcaatattaaaccatgcgtagagtgaggggagaatagatactccgatcaaaacaagtattgctgccggattacggagcaagcgtttcatatcgcggcgaaaaatccgaaatgcgtttctcatggataaaactccttttcttaaaaatatttctagtaatagatacaatgttgattttcatgtcaaaaagtattatattaatgtagaaactaatttacaaccattaatcaatactggatatgtctaataatagacgaaagattgaaaaatgtctagcaggtgaacaaaatcattcatttaagccatagaaacgttactgttcactcccgtgtcaatcactccgctgattgacacggaggatgcgtgttttgacttgaatgcatctcgccccatcgccaaaggcgatttaaaatggcgagatgcgttgctggtcgcacatcgtgcgaacagtaacatagaaacagggtaaagagttgttggtcaggagtactgtaagttataaagggggaagagaagatgcagaagaagacagatcgcagagtcagaaagacaaaaagtcagcttaaaacaggtcttgctcaattgatgagggagaagagtatcagagagattacggtaaaagaattggtggatgcggtagatatcaatcgttctaccttttatctgcattattctgatataccagggctgcttgcagaaattgaaaatgaaatgatggaagagatgcagcgcgcaatccgtgaacatccaattgatccgggaaaagataccgtttactattttattcaggatttgtttcatgtgcttgatgaaaatcgtcaaattgcaagcgcacttgtaggaccacatggggatattggttttgtgcataagttagaacagcttttagaggagaagagccgggagtcacttgcggctcttgtaccggagaaatcaggtgaaatgaaatatttttattcctattgcctgaacggatgtcttggttttgtgaaaacatggttagaaacaggcgaaaatgaaacaccagagtacgcagcagagatggcttatcgaatggttgtaagttcagttacagcattttatgacactaaagaaggaagagaggacaactaagaaatgaaacgagagaaatttggctcacgtctgggatttatcctgatctcagcgggatgtgccattggcttgggaaatgtttggcgttttccgtatattacaggaaagtatggaggagcagcatttgttctgatctatctgctgtttcttgttctgttgggattgccaatcatggtaatggaattcgcagtgggtcgtggaagtcaggcaagtattgcactatcctttgaccgtctggaaccactgggaacaaagtggcactggtataaatggtttggaatcggtggaaactatcttttaatgatgttctatacaacaatcggcggatggcttcttctatatacaggaaagatggcaatcggagagtttaaaggacttgatgcggatggtgtgaccggagtatttacatcacttcttggacagcctgttacaatgacaatctgtatgatccttgttgttgtgctgtgctttggaatcgtctgtatgggacttcagaaaggtgtggagcagatcacaaagaaaatgatgattctccttttcgtgttgatgatcattcttgcagtgcgttccgtgacattgccgggagcagagaaaggactggagttctatcttcttcctgattttaagaaagcagcagaagcaggattgaaagaagttattttcgcagcgatgggacaggcattctttacattaagtcttggaatcggtgcgattgcgatctttggaagttatatcggaaaagaaagaactctgacaggagaagcagtctgcgtaacagttctggatacattagttgcattgatcgctggatttattatttttccggcctgctttgcatttaatgtccagccggacagcggtccgagtctgatctttatcacacttccgaacattttcaatgcaatgagtgcagggagaatctggggaacaattttcttcctttgtatgtttttcgcagcatgctctacgatcattgccgtgtttgaaaatctgatcgcatttgtgatggatttaacgaattgttcaagaacaaaggcggttgtgggaaatctgatcgcgattattgtactttcccttccatgtatttttggattcaacatatggagcggcttcatgcctctgggagcaggaagcagtattcaggaccttgaggactttattgtaagtaataacctgcttccgatcggaagcctgatctatcttctgttctgtacaagccgctatggttggggctgggataagttccagaaagaagcgaatgcaggaagtggaatcaagttcccgggttgggcaagattctatgtatcctatattctgccattgatcgtattatttatctttgtgcagggatattggagtaaatttgttggataaaacaataacaatattgtgaaataaaaaacgctgaaacaatcagaaattcattgccattctattagtgataagttataatttaactaatggttttgcaagagatttacaactgttccaaacggaaagaatacgtttcaatctgaatgcagcagagagatatctcatagcaataaagacatggattttgaatagaatatagactctgacggcaaggaagtgagagataccgagcgggaatagttgtaaagaagcgtttagacaaaaaaatattttgtggttttaacagactctttttccgttgtggagaagagtctttcttttatacccggaaaataaaatgggaggatcagaaatatgttaaaggtagcaatttacggaaaaggtgggattggaaagtccacgatcacatcgaatctggcagcagcatttgccgctatggggaagcgcgtaatccagatcggatgtgatccgaaagcagattcaacgattaatctgttaggcggcgagccattgcgtccggtaatgaattatatgagagaagaggatgaggagccggaagaattagatcagatcgcaaaggaaggattcggtggtgtgctctgtatcgagacaggcggaccgacaccgggactaggatgtgcaggacgcgggatcatagcgacatttcagttattagaagacttgcggttgtttgagacatacaaaccggatgttgttctgtatgatgtacttggggatgttgtctgtggcggattcgcagcaccgatccgagaaggatatgcagagaaggttgtgattgttacatctggagaaaagatggcattgtatgcggctaacaatatttccagcgcagtgcgtaattttgaagatcgcagttatgcaagaatctttggattgatcctgaatcatagaaatgtggaaaatgaaacggagaaggtacaggcatttgcagaagaaaaaaagattcctattgttggtgagattccaagaagtgatgagattatacgctgggaagatcaggggaagactgtgatcgaaggcgacgcagattctgagatcagtaagagattctttgaactggcagaaaaactgttagaggaagaagcagaaagtgtgagataaaatataagttgagggaaaatatatgaagaaagcatatttttgtacagcggaagaactggaacaaagaggaaaggataatcttccgaaaccgtttcagtcaggggaacatttaatctatagttcgccggctacgcttgcctttaactctccgggggcagaagggttcggagtgaaaagagcaggacttgcagtgccgggatcgatcatgctgatcgtggcaccggggtgctgtggaagaaatacgtccatgatcagttcaatgaaagaatataataaccgttttttttacctttgcatggatgagactgatattgtgacagggcgtcatctaaagaagatcccgaaagcagttgcatcaatctgtgaaagtcttgagaagaaaccatccgttgtgatgatctgtattacctgtgtggatgcccttcttggaacagatatggaacgtgtctgtagaaaagcggaagaaaaagccggacttccggtgcgcccatgttatatgtatgcattgacacgagagggaagaaaacctccgatggttcatgtgagacagtctctgtattcacttcttgaaccgggacgtaaaaaaggaaatgtagtaaatctgctcggatacttttcaccactcgtagatgactgtgaattatatacactgcttcaagaggcaggagtgaaaacgattcatgagatttcgagatgtgaagattttgaagaatataagaaaatgtctgaggcgaattttaatcttgtgcttcacccggaggcacgatttgcagcagaggattttcatgacagattaaagattccatttatcgaactgcgcagactttatcagattgataagattggaagccaataccaggcatttggcgcagcacttggaatagaattccatgcagaggaacagaaaaaacaggcacaggaagcaattgagaggttccgtgaagtctgtccggacccggtatttgctattggggaatgtgcaaacgcggatccgtttgaattatcattagcattggtgaaatacggattcaaagtagcagaaatttacggaacaatcactggagagaactttatttatatcagacagttgaaaaagttaagtccgcagacaaagattttttccaatatggaaccgacgatgctctattatgatccaacggaaagtggcgtgacactgacaatcggaaaggatgcatgttattatcatccgaacacaaaaggaatccattggaatgaggagagacagcctttcggatatgcaggcgtgagaagactgtttgaggcgcttgaactggctgtgacagaacaggcagaaggtaatgttttgcagaaacaggtggaagtgatcggttctaaatcacaagaagcaattgcagaacagagtcaaaaatcactgttcaaagaggaagtggacaaaaaagaagacgtttatgtacgtggcctttggaaaggactgactccatttgcaccggatcagtcaggtgcagcgtccgttttctatgaactgggaggaatccttgtcatatgcgatgcgggaggatgtacaggaaatgtgtgcggattcgatgaaccgcgctggttcggggaacgtagtgcgatcttcagtgcaggtttgcgagacatggatgcaatccttggaagagatgacaggcttgttgcgaagctagcggatgcagcagagaagatagatgcaaattttgcagcggtgatcggtactccggttccggctgtgatcgcaacggattatagagcattgcagagaatgtgcgagaagaagacaaatcttccgattctgactgtagatacgaacggaatggaactgtatgatgtgggagaagagaaggcatggctgactttattcaagacatttgcaggaaaagacgtagcatcacagaaggaagtttcagaagaagacgattcttctaaaaagatgaaaatcggagttctcggtctgacgccacatgatgtcagtgacctgcatgtagaagaaaagttccgaaaattagaaaatgagaatacgcattatatttgctatggaatgggagcaggtattgataaagtgaagacagcaggctctgtagacaagaatctggttgtagcaccggcggcactcgagacagcaaaatatttggaaaaagaatttggcacaccgtatgaagtgggatatccatttgtagatgaattgatacctgaacttgattatgaaaggaaaaagatactgatcattcatcagcaggtgatcgcaaatgccatcagacaggaaattcgtataagaagtgatgaacaacagaatacagaagttacggtggcaagctggtttatgatgaaatcagaattttcagaagaaggagatctttcactgaaagaagagaaggattattgtaagcttgttcaaaatggaaactatgacattgtctttgcagatgaaaatatgagaggactggtaccgggattcaaaggaacatttgttaatgtacggcattttgcagtctcaggaaaactgcaggagtcataacgggaggaatcgtttatggagaaggagataacgaagaaaattcgtgtctatggaattgtacagggagtaggattccgtccaactgtcagccgacatgcagatttctgtaagatcagaggaagcgttagtaatcgcggaccttatgtggaaatttttgcacagggaagtgagacggcagtaaatctgtttattgagaaagtccgtacttgtccgccaaaacgtgccgcgattcttaaagtttcagaagaaatactggatacaaaggaaaaatatccggatttttctatcatagaaagcgagaagacaaaaggagagatctttatttctccggatattgcaatctgtgaggaatgcaaggaagaattgtatgatcccaacgatcgaagatacttacatccgtttattaattgtacgtgttgtggtccgcggcttacgattctggatgctcttccatatgacagagagcgtacgagtatgaaagaatttccgatgtgtccggaatgtgaggcagaatattacaatccggaaagcagaagatacgatgcgcagccggtttgttgtaatgcgtgcggaccggaagtttatttgatcaaaacttctgatagaacgatagacaggaaaggttctgatgcaattacggaagcaagaagagtgatttccgaaggcggaatcgtagcagtgaagggaatcggaggatttcatctttgctgtgatgcatcaaatgaggcagcagtggaactgttaagaaagagaaaacgccgcccggcgaaaccatttgcagtgatggcaagaaatcttgaggtagtgcaaagtgtctgtgagttgagtaaggagcaggaagaaattctcactggacatcagaagccgattcttcttttggtgaggaaagagatagaaacgaagcagctgtgttcatctgtcgcaccgggcaatccaaaagtaggagtgatgcttccatatgcgccggtgcagttacttctatttcaatatccggatggaatcaagatgccggactttctcgtaatgaccagtggaaatgtatccggtgcgccaatctgcagatcggatgaggaggcgctcgaagagctttcggaattttgtgactgcatcttgtcccatgatcggaagattcgtgtgagagcagatgattctgtgatggatttctataaaaacagaccatatatgattcgcagatcaaggggatatgcgccacttccggtccagacatcaggaaaatggaaaggacaggtactggctgtcggcggagaattaaaaaatacattctgtatcggtgtggatagtagattttatccttcggcttatgtgggggacttagaagatttaagaacggtaaatgcattgaaagagacaatacagcggatggaaacattgttagaagtggaaccaggcgttgtcgtctgcgatatgcatcccaaatataattcgacggtggttgcggaagaactgggacttcctgttttgaaagtgcagcatcattatgcacatatcttatcctgtatggcagagaatgactggatggaacaggtgatcggagtatcttttgacggaaccggctatggaacggacggaaccatatggggcggagaaatacttctggcagatcttgacggattccggagaatcggaagtgttgaaccatttttacaggctggaggcgacctatcagcaaaagaaggatggcgtatcgcagtttctttaatctggcaaatatctgaatcaaaagatgaggcgatgcagatcattcagaaacttggtctttgtgaggaaaaagaagcgaaagttcagcttgcgatgcttgagagaaagatcaatgcggtagagtcaaccagtgcaggaagattatttgatggaatcagtgcgatacttggaattcgaaagaaatcttcttttgaaggagaagcttccatggcattggaattcgcagcagaagcttatgaaaaaagatctggtgagaagaaaataaatgtcttagacgggcagaagtgtttaactgaatcagcagacgacggaagagaacttcttcagacgggcagattagtgaaaacagcagtagaaatagttacaagcacggatgtaaatatagcagaagatacatcagaacgcgaagtaatagaaaaagcggcatatggattccacaaaggacttgcagagcagattgtcacagcatgtatccatgctaaagagaaaaccggatgtcagacagccgcacttagtggcggtgtatttcagaatggattactgcttcgtctgatggaagacggattaattgcaaatggttttcatgtgctgacacatcagatgattccgccgaatgacggaggaattgcgcttggtcaggcattttatggaatgaatcatgaaagaaaggaatagaaaatatgtgtgtaggattatcagctaaagtggttcgcatcagtgacggaactgcagtggtagatgcaggtggtgcgaaaagggaagtgtcttcagagttattagaagatctggagccgggcgattacgtgatggtgcacgccggagtcgcaattgcaaagatcacagaagaagatgacgaagagaccgatcagcttatggaagaactgctatagagcagtgaacaatggggtgaaaagaataaatgatgatgcaggatataacaaaaaatcaaacatctgaaagaaatgagaaacaaagaaaaacagcgagggaaatcatcgagcagtatgatggacctccggttcgcattatggaagtgtgcggaacacatacacatgagatctttcgccttggaatccgcaaattacttccaaagcaggtggaactgatctcaggaccgggatgtccggtctgtgtgacaccggttgggtttattgacgaggcagtgtggcttgcacttcaagcaggtgtgacagtctgtacgtttggagatcttgtccgtgtaccgggaacaaagatgagtcttgcgggagcaagagaaaagggcgcaaagatccagattgtttattcaccggcagatgcagaaaaatatgcgaggttacatccggaggaacaagtcgtgttcctgtccgttggttttgagacaacaacaccttcttcttgcttatcagtaaagaaagcgaaagaagaacaactagagaattattctatcctgacggcaaataagacgatgccgggagcttatgaagcattaaaaggaagtgcagatgtgtttctttatccgggacatgtaaatgcaattaccggaacggcattgtgtgaatctctgacaaaggagggagtcagtggagttgtagcaggatttactgcgaaagaactgctgacagcattggctgtttcattgaaacgctaccaggaagaaaaaccattttttgtaaactgctatccaagagtagtaacagcagaaggaagcaaagaggcacagcgtcttgtagatgaactgatggaatcctgcgacagtgaatggcgtggtcttggagtgattccagattccggaatgaagcttcgtaaagagtggggaatgtttgatgcaagagtgaaatatcagattccggaaatggaaggaagagcaaatccggcttgtcgttgcggagatgttttacagggaaaatgtaagccatcagattgcaaagtatttggaaaagtctgtacaccgcagcatccggtaggagcatgcatggtttcaaatgaaggtgcgtgttccgcttatttcatgtacggagtatagaagaaaatagaaatggttactgtgaacagtgacggaaaaagaggaaataatatgagcgaaaaaatagaaagccagacagttacaatggcacacggagcaggcggaaaacagacttcagaactgatcgacaaagtatttgcagcacattttgcaaatccggatctgacagcagatgatgcagccgtattaaatccgccggttgggaaaatggcagtgtcaacagatggatttatcgtatctccggcatttttcccgggaggaaatattggaaaactgtctatctgcggaacagtaaatgacctggcctgtatgggggcaaaaccattatatctgacttgtgcatttgtgatcgaagaaggattcccaatggagaaactggagcagattgcggaggcaatggctaaaacagcgaaagaagcaggtgttcgcatcgtatcaggagacaccaaggtcgccggaaaaggacaggtagacggagtctttatcacaacaaccggaatgggacaaattgaagatggcgtacaggttggcggagaacttgcgaagccaggagatgcagttatcgtaaccggagatatcggccgacatggatgcacgattcttcttgcgagagaagatttcggaatcgaggcagatgtgaagagcgattgcgccccactttggaagacggtggaggctgttatggacacgacacatgaacttcatgtgatccgcgatgcgacaagaggcggtgtcggaactgtattatacgagatcgcaggacagagccaggttggagtacagattgatgcagcaaaaatcccggtagctaccgaggtgcagggagtctgtggaatgcttggacttgaaccactttatcttgcctgcgaaggaacaatggtgatcattgctccggcagaacaggcagaaaagatcgtagagacacttcaccagtgtccatactctcaaaatgcagcaatcatcggaacaatcacagaagaaaacccaggcaaagttatccgtatgacagaaatcggaacccagtccctcctcccacagccaggtggagagttgttgcctagaatatgctaaaccagttccgaaatgcggagaaagttgtctcttcatgcgctgcaagctagcttgcataagcaagaagagacaactttctccatatggcgaacgccatacagcgaaatggagcgtgagcggaattagctgtagcatgaggaacagaagagagcaatacagcgaaatgaagcgcaagcggaattgagctgtagcatgaggaacggaagagagcgatacagcgaaatggagcgcaagcggaattgagctgtggcatgaggaacggaagagagcgatataacaaaatgcggaaaggagtcaaaatggatacaagagtagcagtaatctccataattgtggaaaatccggaagcgatcgttacactgaatgatcttcttcatgaagccggaaattatattatcgggcgtatggggatcccatacagggaaaagggaattaacatcatcagtattgcaattgatgcaccgcaggatatgatcagcagcctttccggaaagatcggaagactcaaaggtgtgtcagcgaagactgcctattcaaacatcattacaaaagcggaggcacagaatgattaaaattgcagtatatggaaaaggtggaatcggaaagtcgacgacagtctccaatgtggcagcagcactggctgagcagggattaaaggttcttcagattggatgtgacccaaaggcagattcaacgattctgctccgacatggagaagaagttccaaccgtacttcatatgtatcaggaaaagaaaaagaacctgaaactggaagatattgtgaaaattggatacaaaggaattgtctgcgtagaagcaggcggcccgacaccgggacttgggtgcgcaggacgcggaatcataactgcactggaaaaactcgaagagacaggtgcatatgagaaataccagccggatgtagtgctttatgatgtgctcggagatgttgtctgtggtggattttctatgccgatgcgaaatgggtatgcagacaagatctttattgttacatctggagaaaatatggcgattcatgcaggtgcgaatattgctatggcggtagaaaactttaagaatcgcggatatgccacactgggagggctgatcctgaatcgaagaaatgtcccgcgtgaggaggagaaagtagaagaactggcggaagattttcatacaagtatcgtaggaactttgacaagaagtgatcttgttcagcaggcagaagaacagaaaaagaccgttcttgaagcatttccggaaagtgaaatggcagaagaatatcgtatacttgccaaagcaatcctgatgaaagtgagagaaaaacaagaggtgtcaaatgcttagaaaagttggagaatcagcctggccgatcagtgagaaagatgcggttgtcagcataaaagacgcatcctatccaattccgttcccacaagggctggaatttaattcaccggcacatggctgttggaatatcgttcataccggaatgctgattccggaagcacatcagatttatgtctgtgcggacaactgtatgcggggcgttgtgcttactgcagcagagatgtgtgaagaagatagattttcctttgtgatcgtagaggagcagaacctgttaagcggaaatctggaagatgtgacgattgaaggaacggcagatattttaagaaaactaaaagaacgcgaggaaaagacgggacagaaaatgccgaaggcagttcttctgtttacagtatgccttcatcattttctcggatgcgatctggagcggatttacagggaactggagcaacgatttccagaaatcagatttttgagatgctatatggatccaattatgcaaaaacatggaccaacaccggatcaaaagcttcgaaaagcaatgtatgaaccactgaatcccgatcagaataaaatggatacaaaacagatttccatattggggagtgactttgcgttagatctaagctgtgatttaaaggaattgctagctatagcaggatataaagtcagagaattgcaagattgcagcacatgggaagagtatgaagaattgggaaatgcgggaacatttctctgttgttatccatctggaaagtacgggattgaaacactggcagaaagattaagaagagcatttctttatctgccacttagttttgattatgaagaaatcagaaacgaagaagagactctgtggaattctttgggagtggaaggaaagcagattctaagtgaatggatggaaaagaaaatcacactttgcgaagaagcgttaaatcatgcaaaacaaattattggaaatgctccaattacgattgattatactttccatccgcgtccacttggactggccaggcttttgctgatacatggatttaacgtaaagactgtttttctggacagtataagtccggaagaaaaagaagtatttgaatggctgaaagtaaatgcaccaaaactggaacttcgtgcgacagttcatgcaaagatgcgtgtactgcatgaagcgcatccttcggaaaagacacttgcaatcggtcagaaagcagcgtggtctacaggaagtcattactttgtaaatctagttcagggagccagcctgcaaggatttgacggaatccgaaggacagcggaacttatggaagaagcatttttgaatgaaaaagatccgaaaacaatgatcgtaagaaaaggatgggggtgcacaagctgcatatgagacaatcatatcgaatcataccgatttatacttcagatgtatcaggtgtctgttctgcactttatgagttgggaggcatggtcgtgatgcacgatccatccggctgcaattctacctataatacacatgatgaaattcgctggtacgatcaggatagcctgatttttatttcaggtctgacagagattgatgcggtcatgggaaatgacgaaaaatttttatcagatatcaaagaagcagcacgtgaatttcatccgaaatttatcgcacttgtcagttcaccgattccatttatgaatggaaccgattttccggcactggcgaaagtgctggaaattgaaacaggaataccatcctttgcagtgccgacaaatggaatgcatgattatgtatatggagcaggaatcgcattcgaagaaattgcaaaaagatttgttacagaaaaggaagcaagaggaaactatgcaaaacggacagtaaacctgcttggagcaacaccactagattttggtccatttcccagagtagaagaattaaaaaataatctggagaaatgtggatgggagatcctttcaacctgggcgatgggagacagtttggaagatcttgtaaaagcaggaaatgcagagatcaaccttgtcgtgtcagcagttgggctgcgggcagcaaaagcgttaaaagaaaagtttggaaccccttatgtgatcggaaccccttataaagaatatgcagagagaatcagtgaagctttggaaaagaaaatacctatgccggcattggaagatcgaaaagaatgggaaaagaatacagctatagaagattggaaatcacaaatagttactctgatcggtgagccggttacaacaacatctcttgcagctttaattgaaaaagaatatcactataaaacaaaggttctttgtccgttagaggaaacggatggactgattggaagtcaggatttaaaagtatgcggtgaagaagagatggaagaggcactgaaggatgcgcaaattgttgtagcggatccattatatcgcccaatctgcccggctgagtgtgagttttatgagagagcacacatagcattttcagggagaatgtttctaaaaaataaataagtagggaatggcctggatttttgaattgttgttttgattcctatggatccaggtcgatttttatcattgacagtagcagtttattttgctatagttaatccacatcaaaatctcagacatatatttctatatttcatttgtctgaacatgttatcgaagagataacaatatctcattttcaaggctatatcagcatgagattccatttttgatgatttaaaaacaaaagaataaaaatcagggaggaactgtctatgggaaaagcagatgttaatgtcaatatctggctaagtgaaaaaaatcgattcgcaaatttatttaatggtgtgatttatggtggagagaatgtgatattgcctgaagatttagaagaggtaaatccagtctcatctgttaatgtgaaaaacagagtaggaaaaacgaaaagtatgaagaaataccgggacattattatgcgatggaagaaccaggcgacgcttgtacttcttgcgaatgaagcgcaagataagattcattatgctatgccacataaagtgatgctttatgacggaatggattatgaaacacagattcgaaataactgggaatgttttacagaaggccaaaggcaggctaaaaaaacaggacagacgttagaacatcttacagctggagaatacttatctcgttttcgaagaacagaccgattaacgccgattatttcgctcgtattttattatggatcagagccgtgggacgggccggtggacttatatgacatgtttcgattagaaggaacggaaaaagaaaaagcaattcttgaaaaatatcttccaaattatcggattaatctggtagatgcagaacgcttagaggaaacagagaggttctctgaggatttacaagtgatattaactatgctaaaatatagaaaagataaggatggattaagaaactatgttaatgaaaataagcaattctttcaaaaggttgaccatgagacaagtcaggcgatgaaggcatttttaaatatgaaacagataccaggtgagaccgagaatgaggaggagataatcaatatgtgtgaagcaattcaagaaatgtatgacgatggcgtaagagatggaatgaagcgaggaatccagcagggaagggatgatctgttaaaggaaaaagtaaagagaaagctgcagaaacaaaaatcacttgagcagattgcggatgaattagaagaagatgtcaaggtgattcggaagataataaaagaagtacagtgatacagcatttgctgattggtgttaccgaaccgacaggaagttttgaataatgaaaaagacgggatgacagatcaatactgtcaccccgtctttttcagataccacttttctatcagactgattatcgcatacaacagcactgcaatgatacatagaatgcagatactcatcagaagccagtcaagtttaaatacctggctggaatagatgatcaggtatccaagtccgcttcttgcggctagaaattcaccgatgataactccgacaagacaaagtccaatattgactttcatattactgatgattgccggaatggaaccaggaagaaccaccttggtcagcgcatgcctgcgttttccatgtagtgtgtagatcagacgaattttttcctggtcgatcgtagaaaaactggtgtagaggttcaggatacttccgaaaattgcaacggacattccggcaacaacaatggttgtggtattggcacccagccagacaataagtaagggcgccaaggcagattttggcaggctatttaggacaaccatgtaagggtcaagaatttcggaaagtccatggaaacaccagaggaggattgcaatcagaatgctggtaagtgtgaccagaagaaagctgacaagtgtctcatacagggtgattccaatatggtgaaagacagaaccatcctctgtcattttcagaaaacaggttatgatacgggaagggctgctgaagataaaggaatcaacaactccggtatcggcacagatttcccattgtaacaggaataagaaaagaatcagaatccgcagaaagacgaccatccgtcggcgtctgcggaattttttgagaaaacgaagatgctcagttgtcatggtttagctccttccagatttgattaaagtagtgtttgaattcaggtgcattccgccgatttaaaggtgtgtcttgttctaatttaaagaaaatcggaatttcgcaacggactttggcaggacggttggtgaggacaatgacccggtcggaaaggctgactgcttccgatagatcatgagtgacaagaagtgcggtctttccactctgtcggataatctggccgatgtcgtcgctgacggtcagcctggtctgataatccagagcggaaaagggctcatcaagcagtaagagttgcggatcaggcagcagagtccgaatcagggcggcacgctggcgcattcctccggaaagctgggagggacgtgcagaagcaaattgttttaaaccatattgttcgagaagctcatacgcacgttttttggttgcagtatttagtgtgccgcagatttccggaccgagggtgacattccggtaaatactgcgccagtccagtaaatgatcgtgttggagcatatagccaatcaggggggaattttccttgagagggataccatttaacaggatttctcctgcatctggcttcatcaatccacagatcagggaaagaagtgtagatttgccgcatccggaaggaccgacaactgctgtgaaggttccaggttgcacggaaaaggaaagatcagataaagcccttgtttctgcgtccaatgtgtgataagaataatatatgttatgaagttccagaagagaattcattgaagactccatttcagtagtagttaatgttatgatatgtaaaaataatcctgagagtgaatcaatgaacatgtcaggcgttttagaaaaaaggaatgattgatctggaacaaagatacaggagaatgatgaaaatgaacttacagaaaataaactatcagaaagaactggagaagcttctgacaagactggaaaaggaagaaaaagtaccaactcttttactacatagttgctgcgcaccgtgcagtagttatgtattagagtatttatcacagtattttaaaatcactgtcttctattataatccaaatatttatccggaaagtgaatacacaaagcgcatcctggaacaacagaaattgattgaagagatgcatttccgctatccggtatcatttttagccggtaaatatgaccgcgaccgattctatgagatggcaaaaggactggaagaagtgaaagagggcggttcgagatgcatgggatgctatgaacttcgtctgaaggaagccgcagaaattgcagtagccggagaatttgactattttacaacaacacttagtataagtccgatgaagaatgcgcagaagttgaatgagatcggacaacgtgtcggtgaagaatatggtgtacagtatctgctttctgatttcaagaagaagaacggatataagagatctatcgaattgtctggaatctatggtctttatcgtcaggattattgtggatgtgagttctcctataaagcgcgtcaggcagaaaaatgtgtgtgaaatgacggaagaagcaatcaaaatagcagaaaataagaaaaaatctacagaattcgtcgaaatcaggtatattttgcaagtttatagtagacatttgacactttagtgtgataaactaatgggcaaatacgatataatagaaaaggggaaagacagatggcacagttatggggcggtcgttttacaaaagagacagatcagctggtttataattttaacgcatccatctctttcgacaagagattctatgagcaggatatccgcggaagtattgcacatgtgacaatgcttgcaaagcagggaattctgacggaggatgagaagaagcagatcattgacggactgaacggaatccgtgaggatgtggaaaacggaacacttgagattacagataaatatgaagatattcacagctttgttgaggcaaacctgatcgaacggatcggggatgcaggaaagaagctgcatacaggaagaagcagaaacgaccaggttgcactggatatgagactttatacaagagatgagattattgagcttgacggacttttgaaagagattctggaagttcttctgaaactgatgaaagagaatgtcgaaacttacatgccgggatttacacatcttcagaaagcacagccgatcactcttgcacatcatatgggagcttatttcgagatgttcaaacgtgacagatccagaatgaaagacatttataagagaatgaattactgtccgttgggagccggagcacttgccggaacaacttatccgcttgacagagagtacacggcagagcttctggattttgcaggaccgacactgaacagtatggattctgtatctgacagagattatctgatcgagcttttgtcagcgatgtcaactgtgatgatgcatctgagcagattctcagaggaagtgatcatctggaattccaacgaatatcagtttgtggatattgatgacgcttacagtacaggaagcagtatcatgccacagaagaagaacccggatattgcagagcttgtccgtggtaagacaggaagagtttacggagcattgacatctcttctgacaacgatgaagggaattccgcttgcttataataaagatatgcaggaagacaaagaacttgtattcgacgcaattgatacaacaaaaggatgtctggcgctctttacaggaatgcttaagacaataaagtttaacgatgcacgcatggaagagagtgcgaagcatggatttaccaatgcgacagatgcagcagattatctggtgaatcatggagttccgttccgtgatgcacatggaatcgtgggacaactcgtactgtactgcattgagcataagaaagcactggatgatatgacaatggaagaattcaaagccatctcaccagtgtttgaagaagatatttatgatgcgatcagcatgaagacctgtgtagagatgagaaatacgatcggtgcaccgggaaaagcggcaatggagaaagtgatcgcaatcgaagaagcttatcttgtgacagagtaatggataatcacagcgagcaaaaataactgaatattttctttcattatataatgggaattgaaagagaacgtttggatagaagatagaaaataagaagaaaagggagaagaaaacaatggagcagaaattaaaagtaggtatccttggagcaacaggtatggtaggacagagatttatttctctgcttgagaatcatccatggtttgaagttgtaacagtagcagcaagcccgcgttccgcaggtaagacatatgaagaagcagtaggtgaccgttggaaaatggatacaccgatgccagaagcagttaagaagctggtagtcctgaatgtaaatgatgtagagcatgtagcatctacagttgattttgtattcagtgcagtggatatgtctaaagacgagatcaaagcaattgaagaagcgtatgcgaagacagagacaccggttgtatctaacaatagtgcacaccgctggacaccggatgtaccgatggtagtaccggagatcaatgcagatcattttgaagtgatcaaagatcagaagaaacgtcttggaacaacacgcggattcattgcagtaaaaccaaactgctcaatccagagctatgcaccttgccttgcagcatggaaagagttcggaccaaaagaactggttgttacaacataccaggcaatttccggagcaggtaagacattcaaagactggccggaaatggttggaaatatcattccattcattggtggagaagaagagaagagtgagcaggagccgcttcgtgtacttggtaaagtagagaacggacagatcgtgaaagcagagcttccgaagatcacatgccagtgcgtgcgtgtaccggttctgaacggacatacagcagcagtattcatcaacttcgagaagaagcctacaaaagagcagctgatcgagaagcttgtagcattcaagggattcccacaggaagcagaacttccgagtgctccgaagcagtttatccagtatcttgaagaggacaaccgtccacaggtaacagaggatgtgaactacgagcgcggaatgggcgtatctatcggacgtctgagagaagatacaatgttcgattacaagtttatcggactgtctcataacacagtaagaggtgcagcaggtggagcagttctctgtgcagaggcattgactgcaaaaggatatattgcagcaaaataagaaaaatagaaaaaggcagtggcaataccaaaatcgtcactgccttttatgcgtgatagaccagagacagaaattggggcattgtgagagtggtcggatcacatagatgttttataaaatggtagtaagaggagggccttatggaaaaggaaaataagggaagagcgatagcgctgcttccaattggagtatttttaattatttttctcggcgcgggaattgtgttcgaagatttttatgcgatgccggcaattgtagcttttttgatcgcattgtttgttgcatttttgcagaacaaagaattgagttttaacaagaagattgaagtaattgcgaaaggcgttggtgaggaaaatatcatcacaatgagtttgatcttcctctgcgcaggaggattttccggtgcggttacagcagcaggcggagtagacagtacagtcaatttaggattgtcattgatcccggcgcattttgcagttgcaggtttgttcctgatcggatgtttcatttcggtttctatgggaacttccatgggaacaatcgcagcactcgcaccgatcgcagtcggaatcagtgaaaaaaccggattcgcacttagtatctgtattggagcagttgtgtgtggagctatgtttggagacaacctttctatgatctctgacacaacgatcgcagcagttaagacacagggctgtgagatgaaagataagttcaaagcgaacttctttatcgttcttccggcagcaattattacagttttaatcttctggctggcaacaagaaatatgagcttccagcttgaagagaatcttaattacagcctttgggaagttcttccgtatatggtagttcttcttggagcacttattggaattaatgtatttgttgtattgatcagtggaattgtgatttccctgattgtaggcgtaagcatgggacatattgcactttctgagatgttccaggtggtaggaagtggtgtaacatcaatgtatgatatcacagttatttctatcattgtagcatgtatcgtatcgctggttaaagagcatggtggaattcagttcattctgaatttgatcaagagcaatattaatggaagaagaggagcagagttcggaatcgcacttcttgcgctttttgttgatgcatgtacagcgaataatacagttgcaattgttatgacaggaccaatcgcaaaagaaatcagtgaagagtttgatgtagatccgagaagatcagcctcacttctggatatgtttacttctgttggacagggaatcattccttacggagcacagcttctctcagcagcaacattgaccggactgacaccgcttcagattattccgaatctgtattatccgcttcttatgggagtatgcggagttttggcaatcatcttccggccacagagtaaaaaactacagtaaagtaaagtggtaacttaaaaaagcaaaaataatatatttccttgtggtataagaaaagttgtgttatacttgcagacaagagtgattttcactggaaactataagtaagaaatcaaaataaaagagggatgtaaggatgaatctattatacaaaagcaccagaaattcagacaagactgttacagcttcacaggccatcttaaagggactggctgatgacggaggactgtttgttcctgtatccgttccgaagttggatgtaacaatggatgaacttaaagacatgtcttatcaggagacagcttatgcagttatgaaacagttctttacagattttacagaagaagaactgaaacactgcatcaacagtgcttatgattcaaagtttgatacagaagtgatcgcaccacttgtgaaggtgggagatacttatcatctggaactgttccacggagcaacgatcgcatttaaagatatggcactttctatcctgccgcatctgatgatcacttccgcaagaaagaaccaggtgaaaaatgatatcgtgatcctgacagcaacttccggagatacaggtaaggctgcacttgcaggttttgcagatgttccgggaacaaagatcatcgtgttctatccaaagggaggcgtaagccacgttcaggaattacagatggtgacacagaagggagagaatacttctgttgtagcaatccatggtaactttgataacgcacagagcggtgtgaaggcaatctttgaagacaaagagctggcagcagaattagatgcgaagggatatcagttctcatcagcaaactccatcaatatcggacgtcttgtaccgcaggttgtttattatgtatatgcttatgcaaagctgcttgagaatgaagagatccaggcaggcgaggagatcaatgttacagttccgacaggaaactttggaaatatccttgctgcatattatgcaaaacagatgggcgtgccgatcgcaaaactgatctgtgcttctaatgataacaaggttctctttgatttcttccaaacaggtgtctatgacagaaacagagaatttatcttgacatcttctccatccatggacattctgatctccagcaacctggagcgtctgatctacacaatcgcaggacaggatgcacagaaggatgcagagcttatgacacagctgaaagaaaaaggtgtttatgagatcacagctgagatgaaggaaggtctgaaagactttgtcggaggatttgcgacagaagaagaagtgaaagagacgatccatgacacatatcagaagacaggatatgtgatggatactcatacagcagttgctgcacatgtatgtgcacagtatcgtaaagatacacaggatgaaaagaagtgtctggttgcttcaacagcaagtccgtacaagttcgtacgcaacgttatgacagcaattgatccaaagtatgatgagatggaagatttcgcactgatcgatgagcttgagaaagtatcaggcttcccgattccaaatgcaatcaaagaaatccgtgatgcagaggttcgtcatacaacagagtgtgacgcagatcagatgaaagagacagtaaaaaatattcttggggtgtaaaaaatggataacagcatgtggggatttataggtattttcgttctatgttgtggaatttacgcattgtattcctttgttataatgaaggtaaagggtgagatcaatgcatcaattcttctgggaaaagattatacttataaaaaatgtaaggacaaagaggcttatattgcaaagaccgcaccggcacttttggtcttcggactggtgtctgtgatctatggagtgattgatgtgattcactgttatgttcatacaatgacaataatagatacagttgcaatgattattttccttattgtattgatctggttcggtgtttatacaagaaatctcagaaacagatattattaaaaatgtcagttctgtttctttttgctgacagaaattatgagaaacacgctccgcgagtttctcaagttatcgcggcagtcgccaaggtctcgtgcaagcacggcctttggctcgttgctcgcgtaaatgcaaaaatccacatatttacagttgtaaaaatgatgtggatagagtataatagcaataggttaagaaagaagaaaaacctgaaatgtgcgagaaccctgatattttgaacctacattatttaaaaagggattccgataagactgagtaatatgccaggcctccgtttttgcagtggacggcagaaaagcaggatgaggttgcccacctagctgtggctaggactcaaaatacagggaacggcattttggggattagacaaaagataaagttaagggacagctgaagagattcggctgtctttcttttttgcttgaatattgagaatagttatggtattatccatgaagtaacaatttcgtgacggctgagaagaaacataaggttactgttcactcccgtgtcaatcactccgctgattgacacggaggatgcgtgttttaacctgaatgcatctcgccccatcgccaaaggcgatttaaaatggcgagatgcgttgctggtcgcacttcgtgtgaacagtaacaatataagctgtcctgagtatttaacctggggagttaaagaaaatggagaaatttaataagataaaagagcgcggattgcgaattgcagctaccgtgagttcgcatcatacgggagctttcgcagcacaggcggcatatttctttgtgctttcattgattcctatctttatgttgcttttaacaatggtacaatttacaccagtgacgaaagcggatgtgatggaggctgtacttccagtatttccatccacagtcagcccaatgattgaaagcattgtgaatcaggtatatatgacttcaggtacgatcattcctttgacaatccttgtggctttgtggtcagcgggaaaaggagtactttctgtaacatatggattgaactgtatttatcaaaacacagagacgagaaattatttttaccttcgcgcaagagcatgtatgtatacttttttgttccttgtggcaatcatgctctcattggtgctttccgtattcggcaacagtattagtgttgtagtttatgaacatgcaccgcttataagtaaagcaattcataagattatacagttgaggatttatttcacacttccacttctgactttcttctgggatttggtgtacaagtatcttccaaaccgtggcgcggaaggaaagacgactctacggaaacaattgccaggtgcattctttacagcgtgcggctggatggtactgtcctttatcttttctgtttatttggatatctttaaaggatttaccaatatgtatggaagctttacaacaatcattcttgttatgttgtggttatatgcgtgtatgtatattattctgcttgggggagaaatcaatgcaattttagaaggagttaaaagcagaaaataggaaaaacacaaactattataggagttcatttagacttgacaaaaagaaatgctgtgttaaaataattaaggtaaattcacttagaatatgaaaagtttattagatttgaaaagcaaagatcgtgcacagtagagacctgttttcttgcagagagagagaatcgtcggctgaaagttctcttaagttcagatagcgatcgaaattcacacgtgagctgcatttttgaaaggaagcatctgagagacagttggaagaacagatttgtccggatgtgataagtagagaatgccgtacgttgtacgttacacaacttagagtgcctgtagatcagactgcaggaatcagggtggtaccgcgagtgattcagacctcgtcccttttgggatgaggtctttctttatgaaaacgttcgtccctgataagtgagttaagaaaggagaaaacgatgaaagaaagactggaacagattaaagcggaagcagtcgcaagaattcaggaggctgacgttccggagaaactcaatgacgtgcgtgtaaagtttcttggtaaaaaaggtgaactgacagccgtattaaaaggaatgaaagatgttgcaccggaggaacgtccgaaggttggacagcttgtgaatgatacgagagcagcaattgaggagctcttagaggaatctaagacaagaatggagaaagcaatccgtgaggagaagctgaaagcagaagtaatagacgttacacttccatctaagaagaacagtgtaggacatagacatccgaacacaatcgcactggaagaagtagagcgtatcttcgtaggcatgggatatgaagttgtagaaggaccagaagttgagtatgatctgtacaactttgagaagctgaacattccggcagatcacccggcaaaagatgagcaggatactttctatattaataaggatattgtacttcgtacacagacatctccggtgcaggctcgtgtgatggaacagggaaaacttccgattcgtatgatcgcaccgggacgtgtattccgttctgacgaagtagatgcaacacattcaccatccttccatcagattgaaggtcttgtgatcgacaagaatatttccttcgctgacttgaaaggaacacttgaagtattcgcaaaagagctgtttggaccggatacaaagacaaaattccgtccacatcatttcccatttacagagccaagtgcagaggtggatgtaagctgctttaagtgtggcggcaagggatgtcgtttctgtaaaggatcaggctggatcgagattcttggatgtggtatggttcatccacatgttctcgagatgtgcggaattgatccggaagagtacaacggatttgcattcggtgtaggacttgagcgtatcgctcttctgaaatacgagatcgacgatatgcgtttattatacgagaacgacatcagattcttgaaacagttctagtgagaacagcagaaaaacaagcacgagcgaagtgagtatttgtttttctgttcgaacggtgcgataaaatcttcaagcgacgcgaatgcggcgcgacaacggcgtagagccgttggattttagagcctccattttgagcagaacaaaaaatagaaataaggagatataaaatggatacttcattatcatggatcaaagcgtatgtcccggatcttgacgtgacagcgcaggaatatacagatgcaatgactctgacaggaacaaaggttgaaggattcaaggagttggatgcagaccttgacaagatcgttgttggtcagatcgagaaaatcgaaaaacacccggatgcggataagctggtagtttgccaggtaaatatcggtacagaggtagttcagatcgtaacaggtgccaaaaatgtgtttgagggagcaaagcttccagtcgtattagacggtggacgtgttgcaggcggacatgagccgggacagagagttgccggtggaatcaagattaagaagggaaaacttcgtggagttgcaagttacggaatgatgtgttccatcgaagaacttggttctacaaaggagatgtatccagaacagccggagaatggtatttacattttcccggaggatacagaggttggagcagatgcgatagagcttcttggtcttcatgatgttgtttttgaatatgaaatcacatcaaaccgtgtagactgctacagtgtagtaggtatcgcacgtgaagcagctgctacatttaataaagaatttaaaccaccggttgtgacagagacaggaaatgatgaagatgtcaatgactatgtgaaggtatcagtagagaacacagatctgtgttccagatactgtgcaagagttgttaagaatattaagatcggaccatcaccaaagtggttacagcgcagactgtcatctgttggaatccgtccgatcaacaacctggttgatattacaaactatgtaatggaagagtacggacagccaatgcatgcttatgatcttgatacacttgcaggacatcagatcgtagttaagaatgcacaggatggagataaattcgtcacattggatggacaagaaagaacaatggacaaagatgttctgatgatttgtgacggagaaaaggccgtcggaatcgccggaatcatgggaggagagaattccatgatcacagataacgcgaagacaatgctttttgaggcagcttgttttgacggtgtgaacatccgtaagtccagtaagcgtgtcggacttcgtacagatgcttctggtaagtttgagaagggacttgatccgaacaatgcaatggatgcactgaaccgtgcctgccagcttgtagaagagcttggagcaggtgaagttgtcggaggagcaattgacgtatacagcaagaagaaagagcctgtacgtgttccatttgatgcagagaagatcaaccgcatgctcggaacaaatatttctgaggaagatatgcttggatatttcaagaaaatcgatcttgattacgatgcagagacaaaagaagtgatcgcaccgacattccgtcacgatctgttcagattagctgaccttgcagaggaagttgcaagatttttcggatatgacaatatcccgacaacacttccgtctggagaggctacaacaggtaagcttccgttcaagcttcgtattgagcaggttgcaagtgatattgctgagttctgtggattcagccagggaatgtcttattccttcgaaagtccgaaggtatttgacaagcttcttcttccagaagattccaagcttcgcaatgcgatttccattatgaatccacttggagaagattacagtattatgcgtacaacatccttaaacggtatgctgacttctcttgcaacaaactacaacagaagaaacaagaatgttcgtctgtatgagatgggtaatatttatattccgcaggagcttccactgacagagcttccggatgagagaatgcagtttacacttggaatgtatggagatggagatttcttcaacatgaaaggtgtagtggaagagttctttgagaaaatcggtatgaagggcagagaaaaatacgatccgaatgcaggaaagtcattccttcacccgggacgccaggcaaacatcatttatgatggaaaagtagttggatatcttggagaagttcatccggaagttgctgatatctatggaatcggtgagcgtgcatatgttgcagttctggatatgcctgaaatcatcccatatgctacatttgacagaaaatacacaggaattgcaaaatatcctgcagtgacaagagatatcagtatggttgttccgaaagaaatccttgtcggacagattgaagatgtgattgagaaaaagggcggcgctcatttagagagctttaacctgtttgacatctatgaaggtgctcagatcaaagccggattcaagtcagttgcttattctatcgtattccgtgcaaaggataagacactggaagaagctgaaattacagcagcaatggatcgcattctttccggtctggaagaacttggtattgagttgagaaagtaagaagagagggtaagagcattgaaaacaagtgatttttattatgatcttccggaggaactgatcgcacaggatcctttggaggaccgctcttcctcccgccttatgatacttgataaagagacagggaagacagagcatcatgtatttcgtgagattatcgatgaactgaatccaggagattgtctggttatcaatgatacgaaagtaattccggccagactgatcggagcaaaggaagacaccggagcaaagatagaagtgcttcttttaaaacgaggagcagatgatgtctgggagacattggtaaagcctggaaaaaaggcaagaccgggagcaagaatcagctttggagacggcctgcttgtcggagaagttatggatgtagtggaggaaggaaatcgtctgatccattttgaatacgaaggaatcttcgaggagattctggaccagttaggacagatgccgcttccaccgtatattacacatcagcttcaggataaggacagatataatactgtctatgcggtacactcaggttctgcggcagcaccgacggccggacttcatttcacaccggagcttttggaagagattcgcgcgaaaggtgtggagatcgcaccggttacacttcatgtcggacttggaacgttccgtccggtgaaggtagatgatgtggagcatcaccatatgcattcagaattttatatgattactgaagagtctgcacagaagatcaaccatgcaaaagaagcaggacatcgtgtcatctgtgtcggaacaacaagctgcagaacaatcgaatccgctgccgatgagaatggaagattaaaagaatgcagtggttggacagaaatctttatctatccgggatatcagttcaagattctggatgcgctgatcacgaacttccatctgccggaatctacactgatcatgcttgtttctgcattagccggaaaagagcatgtgatggcagcgtatgaggaggcagtaaaagaaagatatcgtttcttcagttttggggatgcgatgttcatacgatagaaagggacaacctatgtcagaaaatgattttatcattgtagatgaagaagagacaaacaaggaagacaacagacaggacactggcagggaagaagaaaaaaaagaagtgacaacttctgaccattctgaaaaagatgatgacggatatgagagaatatgttttatttgtcatcgcccggagagtgtgacgggaaagatggttgaacttccgaataatatcgcggtgtgtccggactgtatgcagagaagctttgatatgatgaacaatagttcgatggatctgagcaagatgatgaacattccgggcgtacagtttttgaacctttcggatcttgataatctgcagccaaaggcacagaagatcaaacagaagaagaaaaaaccgaaagagtttaaacagttggatattaagaatattccggcaccacataagatcaaagcacgtctggatgaatatatcgttggacaggagtatgcaaagaaagcaatctctgttgcagtttataatcattacaaacgtgtagcaacaggaacaatggatgagattgagatagagaaatcaaatatgctcatgattgggcctacaggatgtggtaaaacatatctggttaagacactggcgaagcttttagatgtgccgttggcgatcacagatgcaacatctcttacagaggcaggatatatcggtgatgacatcgaaagtgttgtttccaagcttcttgcagcagcagacaatgatgttgagcgtgcggaacagggaattatttttatcgatgagatcgataagattgccaagaaaaaaacttccagtcagagagatgtgagtggtgaatctgtgcagcagggaatgctcaaactcttagagggaagtgaagttgaagttccggtaggcgcgaacagcaagaatgcaatggttccactgacaacagtgaatacaaaaaatattctgtttatctgtggaggtgcattcccggatcttgaagacattatcaaagagcgtctgcagaagaaaacgtcgatgggcttcaatgcagaactgaaagatacagtcgagcatgatgaagagctactctctaaagtgacaattgaggacttaagaaaattcggtatgatcccggagttcttaggacgtcttccgattgtatttacattaaagggactcgacaaagagatgcttgtcaagatcttaaaagagccgaaaaatgcaattttaaaacagtatcagaagctgctggcattagacgaagtgaagcttgagtttgatgacagcgcattagaagcaattgcagaaaaggcaatggaaaaagataccggagccagagcactgcgtgcgatcattgaggaatttatgctggatattatgtatgagattccgaaagatgataatattggagaagtaacaattacaagagcttatatagaaggtaccggcggaccggttattcagttgagaggccaggcagtaccgagattagatggataaagtgagattttagaaagagaagttttgttcaaaaatctgaaaactgattggggaattagtttaaaaaaatcacaaaaaggaagagagaaaaatggacacatacagatacttactggatttagcaattattcttatatctacaaaattacttggactattaacaagacgagtacagatgccgcaggttgttggcgcacttctggcgggattgatcctcggaccggcaggatttggaattctggcagagacttcatttatccatgaagttgcagaaatcggagttattgttctgatgtttactgcaggtatggagacggatatcaaagagctgaaagcaagtggaaaagcttcttttattattgctctttgtggtgtgatcgttccactgatcggaggttatggtgttgcctggttctttaaccgtccaagcatggcaggaagtaacctgtcatcccctgtagttcttcagaatgtctttattggagttgtactcacagcaacgtctgtaagtattacagtagagacattgaaagaattaggagcattgaagagccgttcaggaaatgcaatccttggtgctgcgatcattgatgatgttctcggtattatcgcactgacaatcgttacaagtcttgcagatgattctgtaaagcttggaatggttctgatcaagatcattggattcttcgcattttcaggtgttgtcggattcattttctataagatgtataagaaatgggttgacggagctgagaaggaactgcatcgtcatacgattattgcgtttgtattctgcttgcttatggcatttatcgcagaagaagttttcggtgttgcagatattacaggtgcatatatcgcaggattaattatttccaacgtacagagatctacttatctggagtctaagtttgatacgttgtcttacctgcttctgtcaccggtatttttcgcaagtatcggtctgaaggtaaaccttccacagatgtcagtatccatcattatgttcgcagttgttcttacagttgtggcagttcttactaagatagtcggctgtggacttggtgcaaagctttgtggttacaagaactatcaggcaaaacgaatcggagtgggaatgatctcccgtggtgaggttgccttgatcgtagcaagtaaaggttccgcactcggacttatgagttcttccatcttaggaccggttatcgtggtggttgttattacaacagtcatcacaccgattcttctgaaagtagtgttcgctcctggaacaggaccgtcaacacaggtagaagctgcaaagaaggttacaagctactatgagaatcgagaagataacagatagaacaaaagagaaaagaatcgataaaagatattgtagaaactttgaggtcatgggacagttaaagctgtctcatgacctcaaatgtgttatagaggtttaattgtccgtatccccattcacggttagggtattccatactgtctggtcggatggctccaagaacaagaaggcttttgatctggaatacatcgatgccgggcattttgcgttcatagagctgccattctaacataagtgcgactgccccggcggtgatagcagctgcggcgcaggagccgctgcgcacggcaaaacggtctcctggaagagctcctttgatattaatcccgggagcagtgatggaaggattttcaaatcttgttcttgtatagccgcgtccggatgcctgggcgactgcaccattgctgccgtcgtaataggagaccgtcagaggactaggggcattggccgggtttgtaagagtcgtgtaaggatctgattcaaggaaatagacttctccgtctaaaaattctgtgacaggaagccagatatggaaatcaccattaatcaggcgggtcggttctacgatgattttccagatgccttctgccggggtacggaaacggaagaagatgagttcagagtttgctttttcgaccagaagccggtagtcaacagagacgcgggtcttttcaaagagaaaatcaatgtctgcgcttgtgcctacatgaaatggaattttggatgtattttccccggacggtgaaataattgaaattgagaagagattggggatcagtacccaaagttccaaagtgaaaccggatacattttcaccaacccggatctctacagttttacggtcattttctgactggatcgtattgaaataatgatgacgtttgtctgcttcatttcccgtgccgaccacagcaatccggtcgggcatcagactgtagctgccaagtaatgcgggaagcggaagcgtgccgacatgaccgccaagattagagcctatagtgatacacatgacaagtggaagccccagttcatctgccagatcattcagatattttaatccaaggatcagatctgtttcctgatagcagacggctgtttccgtgatgcagtaataatcccgcagatattgcttcgcttgttttaatttgacaacagcgagagtagattccggagcggctcccagaaactgttcgtcagcgtcagcatttccggcagcgagactggcaatataagttccatgtccgtcgatatcgacagaagggacctgtgatagtggggaatcagaagaaagtgccagatcaatctcttccttacggtattcacttccgtagaaaaagtctctgggtggagttccgctttggatagtctgatcccaaagtgccgcaattcgcgtggtaccgtccagattgcggaaaactttgttttgatagtcaatcccgctgtcaagaaatccaatcagaacgccttttccttttaattgaagtgccggatagttctgtacgggaaggatgccggtctggttcaatgtttccatagcgacaggagcaaaacaattcggaatggaattataagaaaaacgcgtcagagagattggttctacaagttctttggaaaaataaatgcactgatatccaagtccggcatcctggatacatggatcttttttcagaagttcattgaacagtggagtgcgcagcggattactgatgaagtcgcgtgtatcttcggagagtatctgttccctgcaagtttcaagatcattcataagatgactcctgagttgagttgtagaaaggatatgcaagaaggattctatttatgaaattagtctaaaaataatagaaaatgacttcaaaaactggaagaatacgatataataagaccaagagaaattgtagatcacctttctggtggttgagatgatacagcaatgataagaagggagatttcagtatgaaagatttttttgaagatttaggaaaacgtctgagcgagacagcagaggcagtgacagcaaaggcaggagatgcgattgagatacagaaattaaaagcgcagatcagagaacttgcaagaggaaatgcagaagatctgatggaacttggtcagagtatttatgacagatttgagaatggagaagaactggatgaggcttccaagggactgtgcgaggcaattgcaagccgcaaggaaagcatagaagagtatgagaataagattgaagggctcaaaggtgcgtgtgagtgtacacggtgtggtaagatggttgcgaaagatatggctttctgcccatactgcggatcacctgtaacagaggaagaagatatttttgaagcggatgatctggctcaggaagtaagagaagaggcagaggaagcagaagagagcgttacagaggctgcggaagcagcagttgaggcggttactgaggccgcagaagaagcagtggatgcagtagaagagtctgtgaaagaagagacagaagaatagtttcaaggaattaagggagaatggaacgtgaaggttgttatattaagttttacacaggcaggaacaagacttggtgagagaattggaagtcagttccggaacgaagggattacgtgtcagaactatgcacctgccggatatgcattcgctgacattcttccgtttccggacaatccaaaagagctgatcagggaaggatggggagagacatccttcctttttattggtgcagttggaatcgcagtgagatatattgcgccttatgtaaaggataaattcactgattcagcggtcgtagtcatggatgaaaaagcagggtatgtgatcccactgctgtcaggacatctcgggggtgcggtagaactttccaatcagcttgcagtatggaccggtgcagttccggtacagacaacagcgacagatgttcagggaaaatttgcagtagatgtttttgcaaagaagaatcacctgtattttacagagcgcgaagcagcgaagcagatatcagctgcagtgctggatggaaagcaggtcggtctgtggatcggtgaaggactggtatttgaacaggaagattttcagaaaagctgtttaaaagaacttatactatgtggttcacaggaagaattgtactcctttgcagaggaacatcctgtgatcgtgatcacaaagaccgcagaagaagggagacagttcgtggaatccctagcgggttctctgtggggagatgtcaggaataacgtatgtggatgtgagcgtaagccatgcattctccttttgtatccaatcaatatcacggcaggagtaggctgtagaaaacagatttcaaaagaactttttgaaaagggtctaaacgatgttctggaaggatatggacttgaacctacgcagttaaaacagcttgcatcgattgatcttaagaaagaagaacctgcgattttggcctatgcgcagaaatataaagtgccgtttgcaacttatccggcagaacagttagagaagattacagaggtatcagctacatcacggtttgtgaaacaggtgataggtgttgacaatgtgtgtgagagagctgcacggacagcagatgctgacggagaactgctgtgtcccaagtgcataagagagcagatgacggtggcattgacagagacagaagtaacacttgaattttgacattaaagaaagttccaacaagttgaagaaaatgtgtttttgctttataatcagtgacagagtaaaaagaaagggttcgatggatgattatgaaagagcatacgcatttccgtgaggacggaacagaatatacccatgtgcatcataacggagatggggtggcagagtcacatgtacatcatcacgatcatggcggcacaggacatgttcaccgtcatgtacacagtgcagaagaaaagaagaaggtaatgaatcgtttatccagagcaatcggacatcttgaggcagtgaagcgaatggtggagcgcgatgaggattgcagtgaagtgctgatccagcttgcggcagttcgttctgcgatcaataatacaggaaaagtgattttgaagaatcatctggatcattgtattgtggaagctattgagcagaatgatatggagacaatccgtgctcttgacgaggcaattgataagtttattaaataaatgtaaatgtgggtgatttgatgaagaaaaatattcttatttttgccggtacgacagagggacgacagctggcagaatacgccgttaaaaaaggaattccctgtatcgtaagtgctgcgacagaatatggggaagaactattggaaaatgatctgcagttgcaaaaagagaagcataagaaatcagaacttcgagtgatccaaggacgtatggatcagcaggagatggaagcattctttgaaaaagagcaggtggggcttgtcatagatgcgacgcatccgtttgcagttatagtgacggaaaatatacagcgggcatgtaaaaacagcggaatagagtatttacgatgtttaagagattttttgacagaagaaaggacagtcaggtcagaaaagtttgcttgtgaaagaacaaatgcgattactaagagtgacagttctgtagtctgtgtgaatagcgtggaagaggccgtggactatctcgagcagacgcagggaaatatactgataacaacaggcagtaaagaactggataaatatactcgtttgacaaattataaagagcggtgctatgcaagagtactttccgtactcccttcagtgatgcagagtatagatctcggattttcagggaagcatctgattgcaatgcagggcccgttttccagggaaatgaatcttgcacttcttcatcagacagaggcaaaatatttcgtaacaaaagaatccggaaagaatggaggatttgcagaaaagcttgaagcagcagagcaggcaggtgcagttcttctcgtaattggaaggccgatagaagaaggcttgtcggtagaggaagcagaacaggagatgagaaaatggaacagggattgatacacatttattgtggagacggaaaaggaaagacatcagcggcaatcggacttgcagtccgtgctgcaggaagtggacttaaggttttatttacccggtttttaaaaaatgaatcttccggagaactggcgattctcgatgatatttctcagattaaagtacttcatcttgaaaagtcttatggcttttttaaaaatctttccgaagataaaaagcaggaagtaagggaaacttacttgcagctttggagagcgattgaactggagattcttaccggaagatatgatgtgcttgtgatcgatgagtttatggcggcttataggtatgatctcatcccgaaggaagaagcgatcgagttcctggagaagaaaccaaaagaactggagattgtattgactggacgaaatccggatgaaaaacttattgaacttgcagattatgtgtcagaaatcaagaaagtgaagcatccgtttgatcagggaatctacgcgagaaaagggattgaatattgatgaaggaaatcggaagaacaagatcgggacttcagatgggatatacgaccggaagctgtgcggcagcggcggcaaaagcggcagcagagatgttattgtcgggagaagagattcgccaggtgagactgctgacgccgaagggcattgaactgtatcttgagttggaagagatcatgcgtaagatgtcagaagtttcatgtgcagtgcgaaaatacagtggagacgatccggatgtgacgaatggaatacttgtttatgcaacagttcaaaaggtagagaagaagagtaaaataaattcggagaatagtgtggatctttccgagaaaatcaatctggatggtggtataggaatcggccgtgtaacgaagcctgggctggaacagaaaatcggtcaggcagcaatcaataaagtaccgcggagaatgatctgtgaagcagtggaagaagtttgcaggaagtatgaatatacaggaaatctgcaagtgtgcctatccgtgccggaaggggcagaggttgcgaagaagacatttaatccaagactgggaatcgagggaggaatctcaatcttaggaacaacaggtatcgtggaaccaatgagtgagaaggcactgacagatacgatttacctggaaatgaagatgctaaaagaaaatggaacagattggtgttatgttgttccgggtaattatgggatggactttttgcgggaaaatctgcaggtggataccgcactttctgtaaaatgcagtaattatgtcggcgagacaattgaggatgcaaagcttcttggaatgaaaggaatcttgttgatcggacatataggaaagtttattaagctggccgcaggagtgatgaatacgcattccagacaggcggattgccgaatggaagtacttggtgtgcatgcggctatgaatggcgcggatgcagcagttgtgcgggaaatcatggattgtatcaatacaacggaagcaatggaaatactgcgcagggagaagttgattgagccggtgatggaaagtgtgatgaaacgtattgaattcttcttaaagaccagagcaggagaagaattggaaatcggtgtgattttattttcaacagaggatggcattcttggaaagtcagaaaatgcggatgagttgttaaagaagatacaggagaatagatgaaacaagcaggaaaattttatggaatcggagtgggaccgggagatcctgaattaatgacattaaaagcagttcgaacaatcagggactgtgatgtaatagtacttccggtttcaaatagagaattgacagagccgctactgctagaacaaaatgagatggaaaacagagcagcagaatatttagaaagctgtacagcttatcagattgcagtgcagacagtttcagagcttaaggaaaagcagattctctttctcccaatgccaatgatcaaagataaggaaaagctgagaaagattcatgcacggggagcagaagtgatagagcagtttcttgagaaaggatggaatctggcattcctgacgctgggagatccaacggtttattctacatgtatgtatatagagcagatgattgaacaggatggttatcaggttgagacagtttcaggaatcccatctttttgtgcagcagctgcaagactgaatcagccacttggagagcaggaagatcagatccatattttaccggggtcttatgaggcaggagaaggtctgcagttatcgggaacaaagattttgatgaagaccgggaaaaagatgggacagataaaagagtttttacaggggagcagtcaggatatctgtcttgtagaaaactgtggaatggacgacgaacgtattgtccgatcagtggaagagatttcagaagatgcgggatactattcccttctaattgtaaaagacaggaaaagatagaaaaggcaggaagaattatgattacatttgtaggagcaggtccgggagcagaagatctgatcacagtaaaaggacaaagacttttgaaggaggcagacatcgtgatctatgcgggttctcttgtgaacccgggattacttaaattgtgtaaagaagaatgcgagatatataatagtgcgaagatgacactggaagaagtgctggaagtaatggtaaagggacacggggatggaaaagaaatcgtacgtctgcatacaggagatccttgcctttatggtgccatccgggagcagatggatgagctgaaagaacttgagataccatatgaagattgtccgggtgtcagttcattttgcggagctgcggcagcactggaagcagagtatacattgccggggatctctcagtctgtcgtgatcacgagaatggcgggaagaacaccagtgccggagaaagagtcagtcagaagctttgcggcacatcaggcgacgatggttttattcttgagcacaggactgttaaaggaactttcagcagaattgatcgaaggcggatacagcgaagatacaccggcagcgattgtttataaagcgacctggccggaacagaaagtacttcgttgtacggtaggaacgctggagcagactgcacgcgaggcggatgtcaccaagacagcgctgatcgtagtcggagaagtgcttgacgggacttatgagagatcaaagctttatgatccgacatttacaacagaattcagacaggcctcctgttctaagaaggaattaggacaaactggagaggatcaaagcacagagatgagacaggaagcagaggaacagaacaaatgagtacagtatatgtagtaggactcggaccgggagcagaagagcagatgacagtgcgtgcacagaaagtattggagcattgccctgttttgattggttacaatgtttatattgatcttgtgaaagagcagtttcctgataagatatttttgagcactccgatgcggaaagaaccggaacgctgcagaatggcttttgaagaagcagaaaaaggtcaggacgttgcaatgatctgtagcggagacgccggagtctatggaatggcaggattgatcttcgagataggaaaagaatacccttccatccagattgaagtggttccgggaatcacagcggcatccggcggggcagcagtgcttggcgcacctttgatgcatgattttgctgtaatcagcttaagcgatcttctgacgccgtgggaaacgattgagaagcgtctacatgcggcagggatggctgattttgtaatctgtctttataacccatccagtaagaagcgtgcagattatctgcagaaagcatgtgatatattgcttcagtacagagatgcaggaaatatctgcggttatgtgaaaaatatcggacgagagggagaagcttatcagattctgtcattgaaagaacttagagatacgaaggtagatatgtttacgacggtgtttattggaaattcaaggacgatggaactgaatggacggatggtgacaccgagggggtataaactttaaatgaaatcacagcaaattatacttgcgggaataggaatgggatctggtgatgtaatcacagaagaagtcagacaattgatagaagaggcggattgtctgatcggagcagaacgaatgattacgagtgcacagcagattcgtagcatgaatggattaagtatgcgtcagtgtgagagaaacaacaggaatgaaggagtctttgttaaggaatatcgtacagaagagattgtatcctatataaaagagcacaaagaacatagtaaaatcggaattcttctttcaggagatacaggattttatagtggtgcgaaaaaactaaaagagcgattaacggaagtatgttctgaacagatagagatttattcggggatttcctcactttcttatcttgcatcaaaagtcggtgtttcctgggaagatgcaaaaatcttgagtcttcacggaaaagacatgaattttgtacagacgatccacagacattcgaagacctttctgcttctcggaggaaaagacacggggcgtcatttctatgagtcattactagagtatggcttaggggacgtgcaggttcatgtgggatgtcagatgtcttatgaggaagaaaagatactttcgggcaaattgtacgagatgaaggcagaagattttgaaggactttgcgcagttcttgtagaaaatccatcttattgtaaggcggccggtatgcatctgaaagatgaagaatttctccgaggaaaggtgccaatgacgaagtcggaagtacgttctgtcagtatagcagagcttgaattaaccgaggatgcaattgtgtatgatatcggcgccggaacaggttctgtttctatagaaatcgcgcgtgcaggtgagcagatccgtgtgtatgcgattgagaagaatccggaaggagtgaaactgatcgatcagaatcggaagaaattcaggacagacggagtgcgaatcatagaagggcttgcgccacaggcattagaggaactggaaacaccgacacatgcatttgtcggtggaagttcgggaaacttacgagagattgtccaattacttcagaggaaaaatccggatgtacgaatcgtgatcaatgcgatttcacttgaaacagtcagtgaagtgatggggcttgtggacgaaggggttctcccagatgcggagattctacaggtgggtgcagcaagatcaaaggttcttggaagatatcatatgatgatgggacaaaatccggtttatattatttccgcaggtggaagaaagcctggacaggtataagatgagagaaaaggaaacaaacagacaggagaatcatgagaaaaatgaaagagaatgcttgcaataataaaaatcagaaaaaaaatccagggtttttgttgtctgctgtttccagtaatagtggaaagacagctgcagcctgtggcctgatgtctgcgtttaagcaagagggaaagcgtgtatgtgcgtgtaaatgcggcccggattatatagatccaatgttccacagggaggttcttggcgttgattctaagaatctggatctgttcttctcggaagaagacattttgaaagagggatacctaaagcatacgaaagatgcggatattactataaccgaaggcgttatggggttttatgacggaatgtcacttgattctgtaaaaggaagttcttatgatgtcgcacagacgctaggattgccagtgatccttgtgattaatgcgagaggtgcagcaatgacacttgtagctacggtgaaaggaattgttgaatttcgtccggatagcaatattcgtggaattctcttaaacagagtatccgcaatgctatatccaagattaaaagaaatgttggagaatgaactggcgagaatcgggcatgacgagattaaaattgtcggttacatgccggaaaatgaagtttttcatctggaaagccgtcatctgggacttgtaacaccgcaggaaatggaaaatctgcaggagaaagtaaagcgggcgggagagattctggcaaaaacagtggatcttgaattgctggaaaagattgccggtgaagcagcagtatggaaaacagaagttattgaagaatcggagaaggttggaaatttaaaaagtaagaacgatccagttcgaatcgcagtggcgcgtgacgaagctttctgcttttattacaaagataaccttgaactattagaaagccttggctgtgaactgatagaattcagtccgcttcatgataaaaaacttccaaaaaatgtgaaaggaattcttctcggtggcggttatcctgaactgtatggaaaagaattggcagaaaatcagagcatgcttgaatcaataagaagagcattgaataataagatcccatgtctggcagagtgtggtggatttatgtatcttcataaagaaatggaggatgcagatggaaatgtttggaaattagtagggcgaatccatggaaaaacatttccgacaggtaagctggttcgatttggatatgtgaatttacagaggaatcttgatgagaatcaggtttctgagcttaaagaacggatgagtatagcggacagctggattcttccgggtgagaatatccgtgcacacgagtttcattactgggatagcacagacagtggaagtgactgttttgctgtcaagccggatggaaaaagaaaatggaaatgcatacatatggaagagaatctcgtggctggatatccgcatttgtattacccatcttgtaaagaatttgcggagcgttttgtagaaaaatgcagaagcggttacagagaatagaacaaagagaaacagcaacagatgtcgttataataacatctgctgctgtttttttaggctctatgaaatatctagatcaatcggttcatccaaatgttcggaaacatatttcccatttttcttccgctgtctgacgcactcagtcagaagatattcaatctgaccatttacggaacgaaaatcatcttctgcccaggctgcgattgcgtcatacagtttagcggagagacggagaggaacctgcttctttttattatctttttcagccatttctagtacagacttccggaattaatgatcggctgtgtgtcatggtttccacacagaactacgagcaaattggataccatagcagccttacgttcttcatccagttctaccacttctttttcacttaattgatccaaagccatttcaaccatgccgactgctccgtctacaatcatctttcttgcatcgatgatagcggaagcttgctgacgctggagcatgacagcagcgatttccggtgcataagcaagatatgtgattcttgcttcgatgatctcaagccctgcgtctgtcactttcgtctggatctcttcacggattcgcgctgcaacaatctcactggagccacggagacttccctcatcagcctttccgtcaccggttgtatcgacatcaggagcagtgtcatatggatagatgcggacaatattacgaagagcaccatcacactgaagtgagagatattctttgtaattatcaacattaaagacagctttcgcagtatctacgacacgccatgttacggcaataccaatctcaatcggatttccgagacagtcattgatcttctgacgggagttgttcagtgtcataaccttgagagaaatctttttgcttgaagactcttcagtggttcctgttgtagaaacacccaggagactggaaagatttgctcccttcttggaattgttatcaacatctccactctgactcaactttgtcttggaagcagggtttacactggtacagaatggattgacaaaatagaatccggcttctttcagtgtaccgatatagtttccgaaaagtgtaagaaccagagcctcttgtggtttcagcactttcagtccaaggaatggaacccatccgatgcatagccaaataatgctgacaaccagtcctgcaataactggcggagcagagaattcatgttccagtgctattgcggacagaatacatcctgctattgcaatcagataaagcagacaaaagagcagaagcattcccattccgtttttcttatttgataatattttttcattcatagtgattcctcctttggaaataaaatgaaatttatttgatatcaatatgatatcacttcaagggaaaaagtcaatatattaggaaagaattttcctaatataatatataaaaaagacaccatgcaaatcgcatgatgcctttttaaaagtatatttattctatttttccagaaaactgggaatttaagaacaatcttacagctgaggacctgcagcaacaagtgctttaccagcttcatttccttcgtatttagcgaagttcttgatgaatctctgagcaaggtcttttgccttaacatcccactcagcagcgtcagcgtatgtgtcacgaggatcaaggattcctgtgtcaacaccctcaagctctgtaggtacttcgaagttgaagtatgggattgtctttgtaggagctttgttgattgctccgttaaggatagcgtcgatgattccacgagtatctttaatggagatacgttttcctgttccgttccatcctgtgttaacaaggtaagccttagctccgctaacttccatcttcttaacaagttcctctgcatattttgtaggatgcagttcaaggaatgcctgtccgaagcaagctgagaatgttggtgtaggctctgtgattccacgctctgtaccagcaagttttgctgtaaatccagacaggaagtagtactgtgtctgatcctctgtcaggatagataccggaggaagtactccgaaagcgtctgcagacaggaagattacattcttagctgccggtgcagaagatactggacgaacgatgttcttaatgtggttgatcgggtaagatacacgagtgttctctgttacgctcttgtcgttaaagtcgatctttccgttctcgtcaagtgtaacgttctcgagaagagcgtcacgaacgattgcgttgtagatgtctggctcagactctttgtcaaggttgataaccttagcgtagcatccaccctcgaagttgaatactccgttatcatcccagccgtgctcgtcatcaccgatgaggagtctcttaggatctgtggaaagtgttgtcttacctgttcctgaaagaccgaagaagattgctgtgttctctccgttgaggtctgtgttagctgagcagtgcatggaagcaattcccttaagtggaaggaagtagttcatcatagagaacataccttttttcatctctccgccgtaccatgtgttaacgataacctgctctttgcttgtgatgttgaaaagtacagctgtctcagagttaagtccgagctctttgtagttctcaactttagctttggaagcattgtaaacaacgaaatctggctcgaagttctcaagttcttcctctgttggctggatgaacatgttcgtaacgaaatgtgcctgccaagcaacttcaacgatgaaacggattcccatacgtgtatctttgtttgcaccgcagaatgcatctacaacgaaaagtctcttgttagagagctctttgattgcgatatctttaacagctgcccaagcttcttctgtagctgggtggttatcgttcttgtattcatcagatgtccaccaaactgtatctttggagttctcatccataacgatgaatttatctttaggagaacgtcctgtgtaaacacctgtcataacgttgacagcaccgagttcactttcctgtcccttttcaaaaccttcaagttccggttttgtctcttcttcgaataatacttcgtaggaaggattgtatacgacttctgttgttccagtaatgccatacttacttaaatcaatttttgccatcttacatatacctctttcttttctaatgatagaataaaatgctgcttatgcaagcttttcatatccttttttaattatacatattatgtgaagaaaatcaataaaaatcctgtaaaatttttaacaaagaagtggggaaaatgaaagatttcatattaaaaatgcaggaagaaaaaagtaaaatgtcaaaaaataaaaaaatgcaaggaaaatatgacagattccgttgcttttttatatatcagaatgcaaaaaattatgataaaataggagaataatgccagaaaatacgaaaaaacaggcatatgaaatttgaaagataaaattctggacagaagaaaatcaagagaaaaataagcggaacaatgatagataatagaagaaaaacaacaaaaatgcaaaagatgtcgatgaacaaaaatgaaagattgttaattgaaaaattcaaaatgataaatccggtggagaagttgtgtgaagaagatgcgaaaagacgatggaaaacagtcgcgaaaccactgttcagtcttggaaagcttgaagacgctgtgatacgaatggcaggaatccgaagaagtgcggagtttgagattaaaaagaaaggcttgctgatcttttgtgcggataacggggttgtctcagaaggagtgactcagaccgggcaggaagtgacagtaatcgttgcagacaattttacaaaatgtgcgacgagcgtatgtattatggcagagacagccggagtggacttatttccaattgatgttggaatggtgaaagacgttccatctgtcacaaaaccaaaagacaaagtgatgtatggaacaaagaatatggcgatggaacctgcaatgtcaagagaacaggctgcacaagccgttcttattggcatacgaaaggtcaaagagctggcagaacaagggtatgatctaatcgcaaccggtgagatgggaattgggaatacaacgacaagcagtgcgattgtgtccgttctgcttgatgaaagcgtagaaaatgtaacaggaagaggcgcagggcttagttcagaagggctgaatagaaagattcgtgcaattaagagagcaattgaaaagcatcagccggacaaggaagatgttttagatgtcttatccaaagtcggagggcttgatattgccggaatgacaggtgcatttcttggcggtgcgatctatcatgttccggttctgatcgatggatttatctcttctgcagcagcattatgtgcagtgcgtatggttcctgagacggcggattatatcttggcatcacattgctctggagaaccggctgggcgaatggtcttagaagagctgaaacttccatatctgattgatgcaaatatgtctcttggagaaggcagtggcgcagttgcagcggttccgcttcttgagatgggtgtgaatgtttatcggaagatgagcacctttgaagagattaaagtagagcagtatgaagagcttaagtgaaaataaggagcagaaaaatgtggttattgaacgcaatgatcattgcaatcgcaatgtattctaagatcccgatgccgcgggttgactggaatgaaaaaaatatgagatatgcgatgtgctttttcccgttggtcggagttataatcggagtatgggaaatagttgcagggaatctgatcaccgtatggaagggagaaggaactttcttttatgcagttgtactgactctgattccggttttcataacagggggaattcatctggatggattcgcagataccatggacgcaaaaagttcttatggagatcgagagaagaagctgcagatactgaaggatcctcatacgggagcatttgcgatcatcagtctttgctgttatttccttctgtgtgtggggatttttagtgaaatgagaatagaacgcctgtttgcggcagcactcgtgtttgtgttctcgcgttcgctgagtggaatttctgttgtgacatttccggcagcgaagaacagtgggctgcttcgaacatttcaagacggtgcacagaagagaagcgtaaggattgtactgatcttctggctattggcagcaggaatcggattatatctgacagcgggattatgcggagtggcttccatcgttgtcggactggcagttttcctctattatgatcgttttagcaggaaacagttcggtggaatcacaggcgaccttgccggatattttctgcagttatgcgaattgtttatgatagcagtgcttgcattattttagatgaaattagatttttggagtgattatggaacttattttgattcggcatttgaagacgccgggcaatgaaaagagacaatatatcggaagtacagatgaagatttgtcagaacaggaagtactgaactttaaaaagaaatgcaaacaggctagttatccgcaagtacaacaagtgattgtcagcccgatgaagagatgtattcaaacggcggagttgatttatccgaagaaccagatcacgcaggaagtattgttaaaggaatgtgattttggtatttttgaaggaaagacatatgaagagctgaaagacagagcagaatatcaggcatggctggattccggtggaacgattgcatttccggaaggggaggagcagaaggaattccgttctcgttgtgtgagaggcatgctctgtcaggttgatagattatgtgaagaaaatgtagaaagtgcagcttttgtcgttcacggaggaacgattatggcggtgctggaacaactagcggaagaccaaaaagatttttatcactggcaggtggaaaatggcggaggatatagaatgcttgttgacgaagatgagtggaagtcagggattcatagatttcgtgaaattcaaaaactgggaggagtgacagaatgaacggaaagatgacgattatggcatgcatcacaggatttttgttagattgcatgttcggagatccggtttggatgtatcatccgatacgcgtgattggaaacctgatcagtgtgttggaaaaaggattgcggaagctgttgtgcagtcagattcctgtgtcggaacaagagaagaaaaacagaagagaagttctggcaggtggaattttatggattctgacagtttcattatcatttcttgtaccggcggtactcttatttgctgcaagaaagattcatccggcagtacggtttcttttggaaaccttctggtgttaccagatatttgcggcacggtgtcttgtaggagaaagcaagaaggtttatcagaaattaaaagaagatgacctgcctggagcaagaaaggcagtgtccatgatcgtcggaagagacacagagaaccttacagcagagggagtgacaaaggctgcagtagagacggtggcagagaatacttctgatggagtgacagccccgttattatttcttttaattggcggcgcgccgcttggattcttatacaaggcagtgaatacgatggattccatgcttggatacaaaaatgaaaaatatctgtatttcggaagaattccggcaaagatggatgatgtatttaattacattccagccaggttgacggcgtggtttatgatcgtggcagcatttttgacggggatggatggaaagaatgcgtggaagatttatctgcgtgataagagaaaacatgcaagtccgaattccgcccagtcagaggcagtctgcgccggagcgcttgatgtacagttagccggggatgcggtttatttcgggaaagtctataaaaaggattatatcggcaatgcaatccgcaagattgaaccggaggatattcttcgtgccgggaagttaatgtatatgacaacgatattgatgatggttgtctttggaggtttattgttatggatttattgattcgatttgcaaaaatggaggatgcagaagaacttcttgcgctttatacaccttatgtaacggatacagtgatcacattcgagtatgaagttccgtcattggatgaattcaaggatcgaatgcgtcagacgatgaaaaagtacccgtatctggttgcagaacagaatggcgagattcttggatatagctgtgcaggggcattcaaaggtcgtgtggcatatgactgggcagtggaaacgacaatttatataagaaaagaccgacaaaaaacaggagttgggaaaaagctgtatgaggcactggagaaagtattgcacgctcagaacatttgcaatctatatgcatgcattggatatcctgaagttgaagatgagtatctgacaaagaacagcgcacagttccatgcacatcttggataccgcatggtgggagaattctatcattgtggatacaaattcgaccgttggtataatatggtctggatggaaaagctgctggatccggaggttaaacatccaaagccaatcaaatggatggaagagaaccgggcagagttagaagcggtactattagaggagaaataaaacagatcgatagagcaggagaaggattcatggaatatgtacacggaggagacatttatacatatggagatgtgctggatttttcagtcaatgtaaatccttacggtccgtcagaagaagttcttgaagcagcaagaaattcgatgacagatgtaaaattgtatccggataatcggtgcaggaagcttagaaagagattggcagagaagaaaagtctgccggaagaatatttccttttcggaaatggagcagcggagctgttcttttctgttgttcttgcagaaaaaccaaagaaagcacttcttccgattccggcttttgcagaatatgaacaggcactccggacggtagagtgcgagatcaattatcatgagttaaaaagagagaataactttgtattgacagaaagctttttggaagaactgacagaggatattgatcttgtattcctgtgctccccttcgaatccgtcaggccaggtgatcgaaccggagctgctggaacagattcttatgcaatgtgaagaaaagaagattcgtcttgttttagatgagtgttttatcgaatttctggaagaaccggaaatgtatacaatggaaaacaagttgaaggattattcttgtcttttgcttgtgcaggcctttacaaaaatgtatggaatcccgggattgagactgggatatgcaatgacatcggacggagaacttaaagagtggatgcagcaggtgtgtcagccgtggaatgtgtcagttccggctcaggctgcaggtgtggaagcactgacagagagagaagaacaaagagttcaaaaaacacgaaaaattattgtggaagaaaagacacgaatcgaagagaaaatgacagagctgggaattgaatttattccgacaaaggcaaatttcattttatttcatagtgagatgtccttgttcgaacaattgttggagcaaggaatcttgattcgagattgcggaaactacagaggattgagcaaaggctggtatcgcattgcggtgcgaacaaaggaggaaaatgaaatgcttttgcatgcacttgaaagagttgtgtcaaaatagcgaaggagggcagaaaataaatatggcaaaatcaattatgatacagggaacgatgtcgaatgtcggaaagagcgcactggcagcaggcctttgccgtgtcttgaaacaggatggatacaaagtcgcacctttcaaatctcagaatatggcacttaattcttttatcacaaaggaagggcttgagatggggagagctcaggtaatgcaggcagaagctgctgggattgaaccggaagcaataatgaatccaattctgctcaaaccgacgaacgatacaggctctcaggtgatcatcaatggtaaaccaatcggagtgatggctgcaagagagtattaccgtcataagaaagaatacattccggcaattatggatgcatatcatgagttggaaaaaagatatgatatcattgtgatcgaaggtgccggaagtccggcggagatcaatctgaaaaaagatgacattgtaaatatgggaatggcgaagcttgcagacgcaccggttcttcttgtcggagatattgaccgaggaggtgtgtttgcacagatcgccggaaccgtaatgcttcttgaagaggatgaaaaagcgcggatcaaaggaacgatcattaataaattccgtggagatgtatccattctggaaccgggacttcgaatgttggaagaaaagacagatatccctgtaacgggagtagttccgtacttttatttagatttggatgaggaagacagcctgacggaacggtttcaaaagaaagagaaaccgggactgatcgatctggcagtgatccgatttccaagaatttctaatttcacagatctcgcaccattagaagcattagaagaagttagtgtaagatacgtttcttctccggcagaatttggaaatccggatgcagtgattcttccgggaacaaagaatacgatcagcgatcttctgtggatgcgtcagaacggactggaagcaagagtcctgaaacacagcgcacagaacaaaccgatctttggaatctgtggcggatatcagatgcttggaatggaaatctcagatccaacaggagaagagtacggaggaactgtacagggaatgggacttttggatacaaagaccgtgttccgcccagaaaaacatagaaccagagtacatggaacatttggcgagatgaaaggaatcctgaaagagatgaagggacttcctttcgaaggatacgagatccatatgggagagacgattcttgatgagcacgcatccgggcttgtaacaatagaaaatgattctgatacgctacaacaaggacatccggatggttcacagaaggaaaatgtctatggctgttatgtgcatggaatctttgattcaccggaaatgtcaggtggatttctctccgctttattgaaagagaaaggctatgatccggagacggtacaggcagtagactggaagtcttataaggaagaacagtatgataagcttgcagatatcgttcgtgccagtctggatatgaaagaaatttacaggattattggattgtagagttagtagaattatttattgaaacagattttttactgaaacaaattttattgaaaaagttgtgatgagagaaggtgtggaatgattacagatttaacgaaagaacatccgaataagacattgtggcgctttcttctgccaatgttgttcagtgtgatgttccagcagatttacaatatcgcagacagtatgatcgcaggaaggtttgcgggagaagacgctctggcagcagtcggggcatcttatccgatcacgattattttcatggcatttgctgtcggaatgaatttgggagcatctgtagttgtatcgagactatttggagcaggtgacagaggtggtgtgaaacgtgcggttacaacagcatttcttagttctatggcacttggaatagtgctgacattgttcggatatttctttaatcatcagatgatgcagctgatccgtacaccgcagaatattatggcagatggagttttatatttgaaaatttacattttcggaattatcttcctgatgctttataatgtgtgtaccggagtatttacagcactcggggattctaagacaccgttatattttctgcttggatcctcagccggaaatattattcttgattacatcttcgtagcaaaattccattggggtgtgagtggtgttgcctgggcaacatttatcgcgcaaggtgtgtcagccgtgcttgcattagtaacacttctcggaagattgcagaaatttgccgggaaagaaaagcagccgtggtttgataagaaattattcggacagatcatggcgattgcaattccaagtattcttcagcagagcgtgttgagtgtaggaaatcttttcgtgcagggaattgtaaatcaattcggttcagcagttgttgcgggatattcaggagcaatcaagctgaatacatttgccatcaatatctttatgacacttggatcctgcctgtctagctatacggcacagaatatcggtgccggaaaaaccgagaggattccgttgggattccgtactggattgaagttatcagagtttacagcactaccatttgttatgttgtatttcattttcagccgtcagatgatgggattattcttaggcgcagagagtgtagaggcaatcagtgcaggaatggcatttttgaaaattgtatcaccgtggtattttatgattgcaattaagctgatgacagatggaattatccgggggtcaggagcaatggtctattttgtggttgcaacagttccggaccttattttgagaatcggatttgcactcgtcttgacaaaaagttttggaagtaccggaatctggatggcatggccatttggttggatcgtagcgaccacattaacattgatcttttatagaaagttgggatataagaatgataaaagcggtgatttatgatatggatggggttttgatcaatacggaaccgcttcattatcaatgttgggtagaaatttttaaagaacgatatggaattgacctggactatgaggtatataagccatgcataggatctacaagactccatttcatgaatctgatcaaagaaaattatggaatcacatttgaaagcctggaagtaatgaatcagattatgaaagagaagaaagatgaaattattgcgcgagacggatttccggagatgccgggagttgagaggatgctccattgtttgaaagatgccgggtatcggctggcagttgcttcatcttctccgaaacctgtaattgtagagacactggaaacattgaatctggtgaaatattttgatgctgtgacaagtggagatgaagtgaaaaatccaaagccggcgccggatatatttctttttgcggcaaagcagctgggcgtaccggtagatgagtgtattgtgatcgaggattcgacgaatggaggaaaggctactaaggcggctaagatgccatgcatctggatgcataatccggattccggagatcaggagataccggatgcagtgctcgagattacggcctggacacagaaaaatatagaaaaaatcatgaagcttttacattttggtcaagaaaaagtattaaaataatttttgagtagaatgattagaaatagtagagctggaagtattattaggatgtgatcggatgaaaaaattgaaatttatttttggcaagcttagtatattttattatattttgtttctgctggtgacgtgcatactttgtaagtcaggaagtaccaggcagttgaagtttgcattttttactttaggtatctttctggtaatcagtctttgcgtctggattggttgcttgatcgcggaaaaggaaaactcttttaaaatgaaaggtgcacttaggaaaacagtgtttggtacagaacttttgattctacttgtagttacggttggatgtatttcttatatcgtatatactgcgattccttataatggagcattgtcctggaaggtagacagcctgtttaagacgaagaaaatagagtatgaacataacaacttctttcgtgatggcgcagaagggctgataaaagatgtcaataagaaattgaaacttccggacgagttatatatcacagatagttttgagatgtcctttgataaagacggaacgataacccacgtgtcggcctatctctacggacagaatgaaaagggaaaagataagacctatctgattgattatgatatagataaaagtgataagattgttgtgcagatcgcaggttacgccaatgcagattatgacgatgacatgaaactggctcctatgttcaccattctggaaaagtcagattgtaagatgcaggtgacacaatggaatctgaattatgcatttgcagataatccgccggaatatgagatcctgtattatggaaaacgctccttcgcttcttcggaaggtcttatttatcttccgggagatgtggatggtgacggagaggtcagcggcatgactgattttacagccttggatagcggtggggaagcacttggatatgaagtatccctatatcttccgcaggatgaatctgtgacgccggtgcgttatatgatggaaccagaatatatcagtcccgatacaattagtcagaatgagcaggcagagaaagattcacaggcgaaagaacaaggaaaagaaaataatacctggacgatcgatacggacggaagcggtgttgtccgattcttcttaaatgagcagaaaggctggaaactttcggttgttgatgcagctcttggaacacgttattacaaactggaaactacgtcagatggtggatataactggacaacagtaaatgaagatccattcgacggaaatggtggagtaggagaaggaatacaattcttcgatgagcagtttggattcatcggtctaggaggggcatcacagacacattcgtctatttatgttacaaaagacggtggaaagacactgaaggaaatagagcttccgatggatactgtgacagaatatccaccgcatatgcaggaatatggcttcacgcttgatgattatcagtatctggaaatgccacagcaggatggggagaattacacgatccatgcgatgacgcagagtggcgagacagaaggtcttgtattcacatcagaggatcaaggtgagaactggatttttaccggggtgtttgatgaaaataacgtatcataaaaaactaataaccttaccataaaagacgaattcattatgaagaatgagttcgtctttttctgccgcacagatcaaagcagtcttttcacagaaaaaatgggatgtatgcaggactctgttgcgcttttcacaggtgttgatatctgtaattctacggatggattcctggacgggtatagttaaatttggacgtttgctagatggttttcgataagaattctgctgacttacaatgaatcgatgaatgaaatctttttcgaaatctgtaaccagaggatgccctcgattaggaagctttctcttggaattctctttctatttttatccaaaataagcttgctggtaaactcatcgtgcttggtagtcaggtaatcgtaagctgcatcatagttggaattcttgattgagatatgtttaattacagctatgatattcatctaccatttctttcaaatcatcacgcatctcacacagttccgaaatacagtctttgatatctttccacattcgatttgtcattggtccgccatcattcaagtaagcttcaatttgattaaggttattaccgcaagcgcccaggttgcggaaaatctgcagaatctcaggatcattgaagaatacttcggtacattttttgatagtgggttttctgctagtgagaagcttgcgaacataatcagataatgtaatatctgcagatacagcttttgtctgaagcacctcatacagctcctttgtcattagaaaatggaagttcacttccttggatggcggaaattctttcttctttctatccatatgttttcctccttttggtaagctgaaggcttccaaagaccgcatctataatgctattgccgtgggagtggggaatggaatccccaacaagttgccaatgctcaaaaattcatttttgtagtacaagacgaaacttgctctagttataccgaattttgtacttatgaaaagccttctatattacctgtggccacggaaaatgagatgattttcccgaataaggtaaatatttcttagagggtaattgcttttaaattcttattagtaaaaaactagactgttttgacatcaaatacgcattctgaaagagggggatagtttggtgtaaaaagcttgcaacaaactttttacaccaccattgtagatgcgagatgcttcgaggtgtttgttttgatgattatttattacgatacaaattcagaacatttacgaaaatggaatatcaaatgaaatcattagatctccaaagttttttacaaaatagttgtattgagccggatgagtttgttttaaacgttgatagcgattttttccgtcttcttccaaatttactccaaagccacaatacatgcagccatttcgtttgtatcccatgtaatataaatctgagattcttacgttgtatctatcaatatattcttgaatgtcttcttcggtccagaaggaaagtggtcttgactggttgtctttacgttcatgaaaaacattacatccatattctaaccaatccttttcgcgttggtaactttcagaggctaagattcctataattgaacattttaaccccaactctctggcttttcgtttgagagggtatttttttagcttttcgcaacatttgtctgagataggatcgtcaatgtacttcttgtattttttgaaattacgatctatatactcaagagaattgttctgggttctttctgtcaatgcgtgttgatacgtgcgaatagcgtttgcgattctttttgaaaacattggatatccataatgacaaacaacttttttgaaattccaggattcactatgtccatcgatgggtaaaacagaaataatgtttgtaccattgcagtctttttcccattttatgtgttgtaatgtttcaggatattcattagtcgtgttagcaaatagatgtagtatatctggataaatgctttttgcaatgtgcgaaagaacggtggaatcttttccgccagagtacgaaatataaacatgatccaatccgaattcagccacagcttgtttgattaaatactttgtttggataatcttcgattccaaattcatttctcttaatgactgtaaagtattacgtctgtcttttatatattccgagtgctttgtaccacatgaatcacaaaaacgcttatcttttgagtataggttattaggtgttaatttctcaccacatactttacaaaacatatttgtttttctccttcgttaaaatataaaataacaatattgttgtacaaatcattatattatacaataatattgttagtcaatgattaaaatatatagttttgttgtatgtatacgggattttcggtataataaaaatagtatgtttatacagtctgggcatatgccctatggtattaaaaaatggagagaagcatgcagcaaataggcaaacatctagcagatttaaggaaaaagaatcattacaaacaaatcgaattggcagaaaaattgaatgtatcgcaacaagttataagtaatattgaaagaggtttgacagagccagatattgcttttttaaaaggcgcagcagatttgtataatatctctcttgatcagttagtaggtagagagtttattgaaacaaaaagtgatgatctagagagtagaataattagttgtattaagcagatggatgaaagaggaaaggagttgagtttaggcttagtaagtcaagtggctcaacatcgaggtaataaaaatggcgataaatagctatttcaacgagaatacattggaagaattaatcgaagaaataaagtatgtatacaaatcagatgaacggccttgggtaattggttatagcggtggaaaagattcaacggcagtggttgagctagtctataaaatgttactttctcttccaaatgagcaacgcaagaaaaatgtttatattgtttcttcggatacgttgatcgagaatcctttaataaaaatttatttgaacaagatgaataagttgcttggagaagctgctgaaaaggataaacttcctattatttcgattatggttacacctccagcaaacaattctttttgggctaatgttattggcagaggttttcctacaccgcgaatgaatggatcttttagatggtgtacagatagattaaaaataaatccgagtgctgattatattagaagtgtaatcaaaaaagaaggacaagaggttgttgttttattaggcgttcgaaaagctgaaagtattgcaagaaaaaggagaattgagggaagggagttagcaaatcgtctgatgaatagacatgaaactatccaagatgcatatgtttataatccgattgtagaacttacaacggatgatgtatgggatgttttgttgaggctggatggtggtaagactccttggggatcaaacaataatgaattggtttcactttatgcaggtgctgatagtggagaatgtccttttgctggaattcaagcgggtggacaaactcaatcatgtggaaattctcgttttggatgttgggtttgtactgtagtcaaagaagacaaatcattaaatggatttattcgtagtgggcatagagaattaattcctcttgctgaattcagaacttggattatgagtattcgagatcaggatgaatatcgtgagaaaaaaaggcgaaatggaacagtgtatgaaactaaagctggaaaaatgggctatggtccatttacttgggaggcgcgtcaattaatacttgaaaaacttcttttaacacaaaagaagatggggtatgagttgattacaatagatgaactaaaagcaattgacgaaatatgggatgatgaattggatctttcgagaagaactttagttgaattgtatgaaaaaatcactggggaaaaactgccttggtatcattataaagaagcgttaattgatgcggaaacagttaatgaattagagaaattagcagaagaaaataatgtaccgtttgacctggtaaggaatgttattttgtctgtttatcataacaaaaactattctaatcagaaaattatgaaagatgaattggaaaggctgttaaatcagcagtggttacatcataaagtactgaaggagattgaagatgaagataaataaaatagtattatataatttcaactcctttgaggggatgaatgagtttgatttttcatctacttgcgatcaaaagaatatagttcttataggtggaaaaaatggcgctggaaaaacatcattgtttacagcaatcaaaattgctttatacggaccactgacttatggatatatggggattaatcctcattatatctcaaaaatcaaagattgtattaatagtaatgcttttcagactgatagggttaagtctaaagttcaaataaatatttcacttttgattgaacgagaagtaaagaaatatgaaattacaagggaatggacttataaaaaacaaagattagaagaacatttttttgttaagtgtaatgataagcttctagatgataaagaacagtcatattttcaaaattatcttttaagtattattccaccagatttatttgatttctttctttttgatggtgaagaggttggaaatattttttctacaagtacgtataacacgtacgtgcgcaatgctgtatatacattatgtggattggatatttttgagataatacgtaaacaaacgggtagattcgttggaaaagcaacaacagaaaaagaaacaatcctactcgatgaatacaaagtattaaaagaagaggcagattctttgcagcttgctattagtaacgctgaattagaaatagatacattgcaaaaagcgttggaggagattgaaacagaaagtttggaacacgaaactgttttcaaaaatgccggtggaatcacagaagcagagaaggaagaactatcaaaacagtatagagaggcggaacaaattaaagttgagtctgcagtaaaaattaaaaattttgttgaaactcttatgcccttttacattgtaaaagaatttgcaaaaaaaatatcaggtcagttagcaactgaatcagacaggggaatatatgaatattttcaacaaaaaatcaaagtggacgatatacgagaaatccttccaaagagtgtgtcagataaggatgctatcagtatagttgaaacgttgtttgaacgacttaagccagttggatacgatgaaagcaatgctcaaatacatgacttgtcccaggaatctactgcaagagtaaatgctttgatctctatgcttgaaaattttgattcttcagaaatggtaagaacagtaatgaatcgccaaaaggcggctgatgttaccatggagataaacaagttattaaagagcgcgatgtcagacgaggatgttgccaaatacaaagaaaaagaaaatgctcttttgcgaagaagggatgaaatttctaaagagatttttgaacaaaagaatcggctggctgaattaaataaccgaatgtcaattgttgctgtccagagagaacgagcgtttcaggcggtcaaagaaaatactcaaaataagaatgtgtatgaattgagttctggattaacagcaatgatggaggcattactatctcacaaatcagaaaagataaaaaatggtttggagaatctcattgttcgaaatttacgatgtatatatagaaaagataaccttatcactcacatcgaaattgatgagaattttaagtttaacttatatcaagacgcaacatatacagcagttgagctaagtaatttaatgagaaatgtcggaaagaataatttctatatcactatcggacagaaaggccttgatcaattgtttttgaaatatgatgttaatacaattgcggacttagagaagatactgcaaattaaggaaaatgattcttgcgatttgtataaaaatattgatttaagtagattatctaaaggtgagagacagatatttattttagccctttattgggccattattattctgtccaatcagaatattccgtttgtaattgacacaccatatgcaagaattgatgcaaatcatagaaaagagatatcagagaagttctttcctaatattagcaaacaggtaataattctttccactgatgaagagattaatgaggaatactacggaattattaaaccatatattgctaaagagtatttgctgattaatgacgaaaatcaaaacaaaacaactattgagaacagatacttttttgagggatagatatgatttttagattaaaaacgtcaaaaagaactcaagaaatttttcatgagttagaaaacagaacaaattataagccatatacgttggtaaagcatgctattgcttggtcattaaaagagaacacatctgttgctgaatataaatcagattcagatggactggacttaaatagacaaacaattacaggcgattatgaaacatattttaaagtgttgattgaacaggtagaaggacgacacttaactgaagaagagttctttcctaaatatgtaaaagcacacattgatagaggaagtgaattgcttttagatatgtataatcatgccggcagtgttgataaatatgtattacaagtcttaggagtaggtgataccgtatgatttattttgataacagtgcaacatcacccattgatgaagaagtattagatgctatgattccttatttgaaggaggaatatgggaatccatcgagcaaatactactgcaaagcaataaatgcaaaggctgcggtagataatgcaagagcaaatgtggctaaactgcttggggcttccgaagaagagattgtttttacttcgggtgcgacagaaagtacaaattttattatcaaagggtatatggattacagaaggttttatgaagatggaaaaaatcatgtgatcacatcgaatagcgaacataaagccacgttaaatacgtgtaagtttctgaatggagaattatattctaacagtgatccaacagtgggacttatgggtgaaaaagtattaattgataggggatacgaagttagttttattcctgtttcaagaataggtgagatagaggctgcaagtgttgaaaagagtattaaaaataatactgctttagcatctttcatatatgtaaataatgaagttggaacaataaataatataaaggaattagctgaaatctgtaagtcgagagatgtgaaaattcattctgatttaacacaggcacttggtaagttgagaataaatgttagtgatctgggattagattttgcatcatgttcagcacacaaaatatatggacctaaaggcattggtgcggctttcttgaaaagtgatgcatatggtattcctccgataacagccctattgcatggaggagagcaggaatatggattgagagcaggcacattggcagttcataatattgtagggttcgggaaagctgctgaaattgccctacgagacatggataatactgagaagcatataaaaagaatggatgaatatgctttaagaaaattgcaagaaatagaggaagtcgagctttgtaatcccacggaaaagagagttcctggaattataagtattttaattaataaaactaattttcataatgaaagattcattaaaaaggttagtgatcaattagccatttcatctggttctgcatgtagtgcaggtgaaccatcatacgtaataaaagcgatgggactggagaaaaaggttacaaaagtactaagaattactattaataaacatacaagcaaagaagatatagatcaattagtaacgataatttcgaatacaatttgagtgaccagaaagcagggtgaaaatatggatagttcagaaaaaactatgaagcaggagtgctttgttaatacgttgtctcgtttaagagaatcttctaaaacagctgttgtatctgcgaatttttcagatccatatacaatgtacatgcatgtaaatagacctgtacaagaaaaatttgtctcagtattaaagaatacatataatacgaaccattcagaattaattctgctttgtggaagtgtcggtgacggaaaatcacatatgctttcttattgcaaacagacatatccggaaatgatggaatcattttacgttcataatgattctactgctagtttatatattgataagccagcttcctacacattaatgaaaataatggatgcattcacggataagaatatagagacatcaaattcaaaggtaatacttgcaataaatctgggaacattaagcaattttttggaggcagatacagagaataactttttgctgttaaaagaatacattgatagagcaggaatccttgatgataagcaggaaaagcaggacgatgacaggtattttcattgtgtgaattttgcagattatcatctctacgagttgtcatcaaaagggatatcctcgcaatatatcaaagggatttttagtaagattgtgcaacaaaaatcagataatattttctataacaagtattgtgcttgctgtaaagagtgtatatctaaaagcatttgcccgataaaaatcaattatgagttgctgtctaacgaggctgttcaaaatggaataattaggtctcttatagaaagtattgttaaaaataaacttattgtatcgactcgttccttgttgaacatgatttatgaaatattggtagatgaacgtcattttgatagaggatctttagaagcgagaaaagagcctcagaaattgactagcgttgcatattgtcaatcacttcttccaaatacgctatttggaaagcgatattcctcagaggtattagatgcaatgagggtggttgaccctatgcaaatcagaaacgagaaaatagatgattttattgtgttttttgaaaacacagaagatatcatgcaagtcattttaaatgacttaggtgagttcgattttgtgctcaatcgggttgaaaaagaggatttttcagatccgtctatgcatatggtaaaagaagcattattaaagctttttgttagaatgtgctggattacagaaactcgaaaggatcttttgccggacgatgaagattattatgaatacatggatgcactctatgcatggaatacaggagatgtttcaaaactaaaaaagatttatgcaattgttgagaagggtattctttcgtggaatggtcatgttgaaaagaatgagatgcaattatcgtttggcaatagcaaaacgccatatcatcttgttcaaacagtaaaaattaagaaggttatagataatcttccaaaagaaaatagagatacattgtatagttttaaagacgaacttaaacttcgttatggatacaatacttcagaggttgcagaaatcgatgtggattatactttgttttcgctgctaaaaagagtattaaacggatatgtgccaagtataaatgacaagcgagtgaatgttaaatgcatggagtttgtgaacaagatttcaatggggggatcaaaacagaatgaattgtttattcgtgatttctctcaaaaagaatcaaaagaatatattttggaatatgatgaagtatttggatatacctttgaggtgagctaatggaaggaacatggttaatatttgaagggaataatggtattgatagtatcttcgacgatcagattaataaagggaaaaagcataaacgtgacgatgcattgataccatttaaaacaaaaacagacaaaaatcaatatgaaaactttaatggtgtagttggtgagttttcacgtttaatgtcagcaacgactgttaaaaatggattagacaaagaagctcttaagtccgcaatgcgaaataaaatgagtgatgactgcacggatgaagagtttaatatgttgtttcatattgttgactcaatgtactttgaagacgggaaactattacctataaatgttaaagcattgacttctatagaaagtaatatttctcagaggcaggttgctgaatatttgtatagcttatttgtagatggaacggatttggtttcaaaatataagaagatgtcagcagatgaagatacaaatgttttagaaaaattggtgtttgattctttagaagatcccaacgcaacaggaacgggagttgttcaaaatgcagattgttttttaccttatgtgaaagaagttttttacaaagattttgatatattaatccaaaacccaggggactatcagaagtatattgatagatttctagcatactactatatgttctatgtatcacaactcgctgtaaaactgagcaggtttgaagacggacaacgggacaatatcgaattaatatacatgactttatatgacgaagttgttactagagttcgaccagggtatgagtatggttggaaatatgtgaaagaaaaattaggacacatgttttctcattcagttgtgctagaaatgttatcacataacattgatggagtccatttggattatattggtttttatgacaaatttaacaattctgatcttgataatacggtcgctatcgagatagaacggattaataataaatatcagaagtggattcctatggattatagaggctgtgttcatgatgtttccaaggacaaaggatgttcagcttctacagaattgaaaaaactatatgaaatcatagattatcagttcattaatggtggaagaaagtctcattataatggttacaacaaaaaatttatagattttgttcagaaaaattttgggaagttccgaggtatgaacgggtatactgtcagtttgcatgataatgatattatcatgtttacacaaataatcttgaaagaaaatgatggacgaattcgtttggcaaaactgtttgaagagttcgaattgagaggattattgtttgacagagaatcaaagaagaagattattgaactatatgaaaaaatgaatctgttagaaaaacgatcagatagcggagatgcgcaatatgtcaaatatgttttatgattatttatcagaaaagattattaaatattttcaaacaaatataccagatccaggagaaaaatactatatacagttcgaaaatgatgaacaggtgggagaactgtattctgtattagagaataatatcatatcttcttcgtttgtctataacgatatcgttcgtgaccagaagtatggtacttatgagttggatttcggcaaagtacaattgatagtagcggcatcgagaagtaatggacctcatcctgatttcttagcgacacttagaaacttggttggtgttgatgctgagtatataaataaagcaatattattcatacattgttcttcgttagatagtattttgggtggggctggaagcctgagcaaagaaggtatgcctttgaatatctctattatagaaagagatataaaaagaaagattaatgaaacaggatacagcaatgtagacaaggctatactagaatattatttagataataaacgtaaggaattggccggaagtattgcatctatatttgaatatgaagatattattcaatgtttaagtgattcacaaatcacttttgaagagtataaaaattttgaattatttccggatgataaattgtctactctgaccggaaaaaaacttaatacacgtttagaagagaatcattcaaatttcgttaaaattgcagaaatacatagttatggagcggataatagcaaactcgaaaatttatatggcgaagatggcgcaaaagctctttctaaaccagagtgggagaaggttccgtattctgaaattgaaaaatatatttcaagcaaaaagaataaagcgactattgaatattatcctatcatatctgatgagaatttatgggatcgtgaagaaggagatacaaaagcaaaaagcaggatcagaaacatcctttcttttgtatcagatactcaggaagaggtaagtttcacacttagcttctctgaatacacaaagagtgtggggattgaaattccaaaagcatatcaaacatttttaaaatgtgttaataatggaaaaaaacttttggttacaattactggaattgaagataaaactgtatttggccactttaaatataatgataatggtgtgaagtatgattttagaattgctgttatacgttgtaacccagggttacttgaaaatatcaagacacagtattctgttgaaatcaaaggaacggataaatcagctattcgtatcaatactgattcagatgatgtggtattttacaacggagaaaacgaaaaaaaatatttcatactagagaataatcaagttgtttctgttggacaaaatgaaactatttcgttggagattggagaggattatccgtattcagagaatagtgaagatgtttgctttgttttgtctacagataactttgttatccctatgattaaagcatttgctatagaaaagccaactgtgatcgaggggatgaaactttggtatttaaagcgtacccaaaaaagcaattttgaaattcttggagataacagtcttatttttggaacaaaaaaatattggacaagagatgaatttagaaaaagccttgatttagaaaagaaatatattaaagcaaggtctccttttgttatagaaaaatctgtagatgatgaggaactggtccctgttaatattgaattaccaaactctgttcaaactgtattcgctcatcttatggactattttaactcattgggttctattccaagtttagtgtacgtgaattcagaggtggaaagcttatataaagaatatttagaggctatatttaatgaaataaaagacattccagaaggggcatatttatcggaagaacaaaaaggcttatttttcttgggtgcggtaaaaaaattacatggtgatcaagaaattatgcttagtccgttacatccaattaatgtagcatatcagttatttatgaatgctcagaatattgatggtttgttggatggtgaatatgatttattaagaaaatttcagcaaacatcgctgcttccatatattaatatggatccatatacgaaagagaagaaaatatatattccaattgagcaggtacatacgccagaatggaaagtctatgtggatgaagaactacctaggtataagggatcgaaggattttgttgctaaattagtttctgaaaaaatgagggagtttgttgagcattttagttatttgttttccgttgaaacaagaactcctttaagaattaatcttgttaatacaggtgattgtcgcgaaatagtgcaaggcattgtcaggtattatgcacattgtttgaattcaggagctactaaagaagtgattcctgtacagattgtgatgtatgcagatgaaaaaatagataatgcctttgaaaccatgtctaaaattgacgatatagaaacgttgattcacacattaggacttgatattaaaacagggaatgtgtcatatgaggaacttattgacatatatcgaaataatgtgagtttctattttaaggctattggagaatcatttgaatatgcgcatgtaacctttatggaattagatgatgatcatcaagctattgctacaagaatggaagatattccttctggtatggtaatgaatggtatggtatctggtgtgccgtcagaaatgttgggagattcgtatagaacaggtttcggaattaagtattcaaatagtgattctgaactagtgaatgttgctgtttattataacacgcttaatgctgccattaatggggaggcatatagagatgatacatgttacgctttgagaatgggattgaataaacaaaagatactggatagattatatgatgcaagtaattgggtcacttttattaatccaaaggttgatttgaattattttaagagtgatccgagtgcaaaagacttgctaataattcattatagtgatcaatataatatgacatccagtggatatgatgccattactgtaacaaaaaaatcaaaacagtatcaaaatgcaatttgcaggtatttgaatgctaacggagttgataacgcacaagatcattcaagaaaaatcattaatatgtttaatgcattaaatggtgattggttgcttcgaatgctttcttataagtctcattttcctgtagaaaaattgagtattctttcggcgatgaaacttgccacaaaaagatattctgtcgagaattgtatttggataccagtgtctctagaagaaattctaagagtttcgggtgctgttggtttatcgcaaaaaggttctgctttatccgcaaagaatctaggatttgacggtcaaactagtgatgatttattgcttgttggtattaaaccgggagaaaatgtaaaagtgactttttacccgattgaggtgaaaattggaaaagtagaatctgattatctcgaaaaaggtgtgaagcaggctcttaagacgcgcggaattatcgatacaatactcggaaatggcccttgcattgataagaatataaagactcgcttatacaggaatttctttatgcaacagataatgatcaatgccgggaaaatgttattatacgaagttggagatgagagtcaaaactgggaaataattacccagagcgatcttagaagaaaacttttaaatgaagaatatgagatagttgatacattgattccgcaaatgggaaaagctggtgtcatttcttttagagaagaatgtaaaaaagagcgagaaataaaggcacagaatgttcttattgttgagaaaacaaaaaaggaaggagttaaccttcttgctaaagatttttgtgaaataccaattgttgaatggtctcttattgctgagacagatacattagagaatgatgatttcgttcaagatgaaattccagaagatggaaatgtaagcaattcaaacgaaaatgttgaacaaagtaacaatgataatttgcagcagaatcgtattgaggttgaagatgaagctgaagaagcaacagaaattagagttctgattggcgaagatgaatacatgcataatgtatactgggaatatggtaacaaggcattagctaacagacatttattgataacaggaacatctggtcaaggaaaaacctatagtatacaaactatgctgtatgaattaaacaagcataatgtgtcagctgtaatctttgattatacagagggatttatgctgaatcagcttgaagaaccgtttagaacttctttgggagataaacttagacaacatatcgtatacagccttggtgttccgattaacccatttaaacgacatgagatagatttggcgggacaaaaaatattggaaaaagaatcccaggtggcagcacgcttggcagatattttttcgcatgtatacgattttggagcacagcagtattcggcaattttcgatgcagctttaaatggtatgcaaagatatggaaaagcaatgaatatgagacacttccaagatgaattagaggaagttgtcgaggctaataaagcagcaaaatctgttatttcgaaaatgtcgccgtttttccatacagttgagtttgtagacaatccagattttgactggggaaatatcttgtacgcggatgaagcaaaggttaatatcatgcaacttacaatatttacaagggaaatgcaagttgcgataacggagcttatgctttgggatgcatggtactatacaaaaaaatatggatcaaaagacaagccgtttgtcgttgtattagatgaagctcagaatctgtctcatacaatgaaatctcctagtgcagctattctgactgaaggaagaaaattcggttggtctgcatggtttgcaacacagtcgctgaaagttttaaaagatgatgaagtagtaagattattacaatcagcgtttaagttatatttcaaaccgacagaggatgaaatggttaaaatttctaaacagttagatacaacaggagaaacaaactggcttccggtcattcagagacttaaaaaaggtcagtgtattgcagtaggagataagatgaaaccgaatggattagtcggtccgactgcaccagtagttgttaatgtgtctgcttttgataagcgtaattagtaatagagtggataagcgagtctggatttgctgtgcaatacagaatggattgaagcaggtttatgaataggcaaaaaatgcatgcagagctacaaggtataatcattatagaagatatctcagactagccagtgtgagtgctaaagaggaggtctttttatgaattcttttattgttagattagaagatttttatagaatgacaaaggacgatagaaatcgtatggatattaataagagtcattacgtcatacctaagtatcaaagggaatatgcgtgggatgatactatgatattagatcttattaatgatattgaagataaggacaagtttttaggaataataatattagacgctgttgatgatcattatgaaattattgatggacagcagagaattacaacttgttatatgattctggtagctctctataatgcttacttgacatcaccgagggagcaggaacgtatcaagagtattattcagccttatggagataatattttggtgaatgattctattggagagtacttaactattcgggagaatagaatcgaaattacaatttcagaagatctttcaatagacatctattgccaaagagaagattttttgagagcgtataagtgtgttgaaaaggctgttaataattttgcagagcaaaataagcttcgtaatttttatcgaaaacttcgagattgcaaattcttaattcttgtaaatgatgatcatggttcaacaaaacctgttgagcagatgttcctagatattaatgaaaaatctaaactgttagatccagcggatatttttaaaggtcattgttttgaaaattttgacgatgagtatgcagatgatttgaaggagttatgggtagaattaaaaaaatgctctatttcttttaagaaatttggaataaaaaatctaagtgagtacatatatgattatttgttgattacggacaataataaaataacagagaagttaaaaattaacggcaaacattacttgtatggatatgatatggatgcaacggaaaatcttttaaaacagatgatagcatatggagaatcagttgtttgtttatatgaaaatatagataaaaatgaatattattttgaggatttatgtttagatgctaaaaattataaagcaactaaagatcataaaattcttaaggcaatgttcaaggatattcttagtcttgatgctcaatattgcaaattaccggtgatgtatatggtgtcggttttatcagctaatagtgcattagttaatgaaatgcagtttgatacatttaaaaggataattactaatctttatgtgtatgctgtattgtttgcattgtcgtcaaataaaaaatctaaacaagtaattgattatacgattcgtaatgcgttgaacggagatggagatgtgttaattaatacattaaagaaagcaaaagaactacgggaaagcaggattgatgaatttacattaccgtctaaatgtagtaattttgaaatgctggcgtgcatttattctattatggataattatgtttcgtctgataattggataacaagaaaatacgatagagacgatgatgtgaatttagaacattttgtaatgcctgataatgattcttatgtagtaaactggattagagaaaatgaagagagaaccattattccgattcctattagaaagactcttgcgaaagaatacaaaaaatatacggtcaactatttattgattgatgagaagttgaatcgtttattgcgtaattatgatatcgtagaaaaaattaaactgataaaagagtggtttcgtgttgttaatgattattcgtgcctgccaaaacatattcgtatttttattgaatatatagaaaagatggatttatatcaagaattagttgaaatgaaaagtgaagatgagtcagataaagaaatattcggtagaaaatattttgaatttcttgacgaattttttagtgagcaaaatcaaagtagcttgttagttgttttgaagaagggatttgaaactacatttcataactgagtgaatatagcagtcattagctgatgattttcaatatgtaggtattgttatggagaacgtaatgcgaatcttaatgcttggcaatagttttacttttgcaaacaacatgccagataccctggctaacttaatagatgccgaagtggttcagcacacccgcggtggagcgcgtcttgccgagcagttgaatcctgacactaagatgggaggaatgacgcaggcggctctggagaatgagaagtgggactatgtaattcttcaggagatgagcaacggcccaattacttcaagggaaagcttcctgaagaacacagcactgctgtgtgagcgtattcgttccaatggagcagtaccggttctgtatgccacctgggcttatcagaagggcggcaagcagctggaatccttcggcatggactatgatgagatgtatcagaaaatgtatgatgcttatcatgaggctgccgatcagaatgaggccttgattgccgatgtaggcaagcgcttctatgaggaagcagctaagcaggatatctttgctgaggatggctgtcatccaaatgagcttggatcaaagcttgctgctcaggtaattgctgatgtcattttagctgatcaggcaaacaaagcagaaatggtgattgaaccaaaggtagaagacaacgatactagacttcgtatcctgtatctctatcagatgcttctgacacagaccgatgagaatcataccctttctacaaagcagatcactgaccgtatgatggagcagcacaatattcttgtgcatagaaccactgtgcctaaggatattgacttgcttcgtgcggctggctttgagattatcggagaacgtaagcgtgcctgggaatactacccggcagaccgcaagttctccgtgccggagttaaagcttctgatcgatgcagtgcagtcttccaagttcataacagagaagaagagtgagagtttgattaaaaagctactctctttgaccagtgagaacaatgcagataagttaaagagatctgtgcatatcaccggccgtgtgaagaccgagaatgaaaaaggctattacatagtggatgccatcaatgaggcgatcaatgccggcgtgaagatttccttctattattctgaacttaatggtaaaaagaaggaagtgctcaggaacgatggaaagccatatgctgtcagtccatttgatttaatttgggatggcgactattactatctgataggttactgtgatgagagggaagctgtgcgtacttatcgagtggatcgtataaaaaaacagccggagatgctgccggagaaggctgttgagaaaccgaagggatataatgtatctaaatatacgacagaggtcttccgtatgttctctacagatgaagcaattgatgtaacattgctatgcgacaactgtattatgaagtctgtggttgataagtttgatatgaaaattaagactcaaagcgtaggtgaggaaaaattccggataaaagttaaagtctgcgtgagtccaactttctatcgatgggtatttggagcagctgggaaaattatgattgaaggcccttcgaatgtgcgcaaagcatataaagagatgttacagaaatcgctagacagtatgaattagaaaaaaatgacggtcgagaggtaacttgtaaaagcattctcgaccgtttctttagaaacaatttttttgtcaacaatctttactgcatctgaaaagaatctccgagcatgtgccaaacaattcgcatttataacatttacataaaacatggcagtataatatatctccgattatcaagtcttaaagacaaaaagaaatctaacaagtataatggtaaatatattggttcattggacgtataagaaatgatggaatatttgaagatgaatctatataaaataatagtgggaagccatcttgacttttctctttgtacttgttagaatatgtgtacaaagaaagtttaccgctgaccaatatgcggtatataagtggttgggtcgaaagtttaccgctgaccaatatgcggtataaaaatggttgggttgaaagtttactccttcgccgtaaggcggaggatttttctatatacattataatgaggacaagataatgaaaaagacgggattctatattataaaagataattttttacggacatgcctgatccatatcttaaaggaaataaggcaggaaacagacctcattattattgcttcgaggattctgatacgggaatattttggatgataccattatcaagcagaatagataaatacaaaaaaattgttgagaataaagaaaaagcaggaaagccgtgtgatattatacatattgtaaaattagatgatagtcgagaaagtgcatttctcatacaagatatgtttcctattatagaaaaatatatagagtgagaatacactattgcgggaaatcatttaatggtaacaagtgaacatgtagccagaacaatcgagcataaagcgaagaaggttcttaaaatgttgaagagaggagtaaagtttactccgactcagccagacgtattgactattttagaaaagttaaaaacaaataaataacagaaaatctaagccggtgttgcgagtatatcagtcttgtaacacgagtctctgtaacactggcttatcttatttggagactttttctcacagtctcaatcgttccattctttgattaagcgcgaatggttgaatcgttttaaaattcgtgattacgatcatgcatatcgactggtattcgaatatttggaagcattttataatacaaagtgaattcatagtcattgcgattatatgtcgccgaatgaatacgaagaactgtattataagttccagcgggacgaattaaccttagtaagttaagatgaggaaaacctcattttaacttgtactaaatcttgacataggaccagaacgtatgtggaaagaacgagacagtatcagtccataaatcaagggttcagaatgattggcagtatcaatgacaagtacggtacgcaagccagagcctaccgcacgggagagcgtgtcagtattgaatatctgaacggttatctgacgagaacaaagctctgttggtgtagatagcccagatacagaacgaacttatctagatgcaaaaggcattgagtgccgagaaagacagcgtgaaaatgaatagatttttggtaatggcagagagctataagaagctgatggagcaggggaagattgaaaaagagatgcgcatatatgagtttttagctacttgcgacagtgacgatttgcacatagtataaagtaacatttaattattagagggggatattatggatacaaggttcaaccagacaaaattaaagaagctccagatcttcaatggatcacaactaaagtatttggcatttgcatctatgctaatagatcatgttaataacgctttaataacaccttatttaaatggacaaggttttctattatatttgtccaatctattttctattttgggcagaattgcattccctctgtttgttttttttcttgtagagggattcttcaaaactagcaacagaatgaaatatctgattatgcttttaatttttggtgtaatatcagaagtgccttttgatttgtttacatcaaaaacttgtttctctccatattggaacaatataatgtttaccttagcgctatgccttgttacaatttggattattgacattcttaaagataaaatcagcaataaatatctttggtatgcgttatcaatcctgattgtagcattttttgggtttctatctatagagctaagtcttgattatgattatcacgcaatagtcgttgcctatctcttttatatattctatgataaacctctccttggtgctggcctgggatatatatcaattataaaagaactttactcatttataggttttggcatgactctaacctataacggtgaaagaggcaaacaatataaatggttaaactatttcttttatccagtacatattctaatcttagggcttttacgtatatatttaaacatttagtttatactagacgggatgcgctggctgtttgatgcaaagacagcgaaagaggttcttgagggaagatagagcgagaacgcagtcaaggggaaggattatgaaaactacagattcaaaatcattaggttaagcaatccgagaaagaagaaaagaattaaattatacacaagcatatttgtctgaattcacaggcctttcgatcacttttatttctgatgtggaacgcggaaaacctacagcagaaattgaaaaaacaatacggcttatttattcaaaacaaacgatttcgccgtacggcatatttataagacgaaataccaaatggatatttgcttatccaatctccatgtatcatttactgaaagagactctccacggaagatctcttcactcaagaaaataatatatcatcagtgcattgtatagctcctgactctggaatctgttcgcaaaactctttcctgtaagctgttctactctctgtaatctgtactttacagtgttcttatgcgaaaacagcttatcagctgtcctctgcagattgcagtcacactcgaaataggcccacatcgtctccatcaactgcgtatgagctttcttctcatactgtatgataggatcaagcacttcatccgcaaatcgctgcatgggcgcagtattttcatacgacatcagcatacggtaaaatcccatctcatcatagaaaatgatttcatttttcctgttaatatgctccaatacggagtttgttttagaggtttcgtgaaagctcttttgtaatttggatatgctttcacatttttcacctatgttgagagtgtattcaattccgttcaggtcattttgcaaaaactcaccaaactgttcaaaaatttttattatcttcttgcaatcatctgtacagtctttcataaagcctatgatcctgtcaccatagcaagaaatgattgcaggataatcacattcggcaaaatattcttttagagtctgtgcaaagtttcttatcatgtcatttgtaatcccttgattcaggtcattgcatgtctctttcgaattttttttgcatagatgtaacacgaagacctgttctaacattctcggatcatttcccgtttgcctgaatttctgctcgatactggatgtattgatacagtttccaaaaataatctctgcaagcagactgtcctctatatcttttctgtcatccagatatgatatagcgtgtccaagttcctcgaaaaagtctaaaagtggcacattccaaggcatggtgaaaaccggaaaatcattattttctgctaaatctattaccttttcatcaatctgtgtcacataattctcgcccatcaataaaagagcacacgacatgttaagttcaattgccttttttattgtttgatacagatcaaaattttttctctgtgttaccggagcacttattattaaaagttcgtttccacgtacccatttctcaaaattaatattctctgccttgtaagaccagcgtatgcccttttccatgccacctgatccggctattacatctgcctgcgacattgtcgtaagtgatagaagatccttgcactgaaacattgcttttccaccttttattttagcagggcgatagctcctgttacctttgcaggaatttttttaaacaaaaattcaccgtgtctgacagaagcagtgattcctgctctctcacagattgcttcaaattctgattttgcatcaagcacgataaagtttgcaggcttattttcctcgattccgtagtgatctgtaatattcatggtcacagctccgttagttgtcacaagatcgagaacattcgtaatctcctcaggtgacatcatttgtgccagatggattccatggtcgagaatcatcatcatgtttccattcccaagcggataccatggatcagacatggaatcctgtgcaaaacatacattgattccgttgtcgtaaagttcttttactcttgtgattcctcgtctcttcggataggtatcctgacgtccttcaagatatacattctcagtaggacatgagatgaaattgatgcctgattttttgaaaagcttcatcatcctgaatgcataactattatccgatgaaccaaaggaacatgtgtggctagctgtagttcttgtgcctataccttccataagtgccaatgcattcaacaactccaaaaagcggctctgcgtatcgtctgtctcatcacaatgtacatcaataagcttattatatttgacagccagttcgattgtcttgtggattgatttttcaccgaactctcgggccagttcaaaatgaggtatcgcaccaacacagtcagcccccatcttaagcccttcctctaccagcttgtcaccgtccttgtatgcgtacattccttcctgaggaaatgcaacaatctgcagatcaagaatatcttttacttcatctcttacttcaagtgcagctttaagacctgtaaatgttggatctgtcacatcaatatgtgttcggatagcctgaacaccatgcagcatctcttttcgtattccactgtaaatacgctccttcatctgttcaacagtcatatttccttttgattcactccaacgctggattccttcaaaaagagttctcgatccgttttcctcaccaaggcttgctgtaaatacataatcaagatgcaaatgcggatctacatatggaggaactaccagttgtccatttaaatcaacttcctcacatcccaccgttttttcctgtggtatatctgctgcgatttttttgaaaattccatcttcaactaatatagaaataagttctttttgaccttttagccttacattcttaaataattttgaacccttcataccgtattcctcttttcttattaacagtaatgatttgaaataatgtcattaccgttaggtcgctatttgttctttacgcacaaatcatagcatccggtcagaatacagtcaataaaatgcaaaatcaacgcttttattttattcttgcgtacaaaaaaagtcaattcaatttgtttgttacacacaaaataaaccggacagatgtaaaagcattatctcctgaaaaaacgatatcataaatatttttgcgagtttcctgtaaggagtacactgactcaaaatctcttgcaagtatatcgctgtagcgatatacttaatacataaggaggagctggtatgaaaaaaatattatatcatggatcagaattcttaattgaaaaaccagagttcgggaagggtgccagacacaatgattacggaagaggtttttattgtacagaaaatatagaattagcaagagagtgggcatgtgcaaagcaaaaaaatggatatgtgaatatttatgaattggacatggaaggattaaaagtattgaatctgaatgattcaaaataccacatattgaattggcttgctattcttgcagataatagaacgtactggcagaatggaagtattgcagaagaggcaaaaaaatacataaaagagcatttcctgatagatattactccatatgatattattgtaggatatcgtgcagatgattcatacttttcgtttgcccaggattttgtttcgggagtaatttcgttggaaaaattatctgaggcgatgcggttagataaattgggcgagcagattgtattaaaaagtccgaaagcttttgagacgatttattttcagaattatgaaaatgtagatgcggaaatatattatatcaagaaagcggagcgcgagcgtgaagcaagacgagaatacagaagacgtaaaaaagaaagtgcagatattcatgagttattcatgctggacatcatgagggagggtatggaaaatggtgatacacgcttattcagatgattatcttacgtcagcccaacgaatattgggagatatgttggatttcgcggtgaacacatatgatatggatattgataaattttttgaaatgtttctggtttcaaatgtgtcacggcaatttgaaattggaaatcctacttatgtagccggaaaaacagggtgtgagttagtcaaagaagtgattcgggattctgggttagtaatggaagagtacccagatgagatgtatttggataaatcaccagaatattggagtggctgggcattggcctattatcaatggtatcgaggaagaacattttcacgcatctacagggcggtatcaatgacggaaattcgaaatatgtatgaagtataccacgagatggatttggcacatttcgtggagcggttggatgaattatggaaccaacattatccggagacaaatctgaaacgaattcgtgatttggcgggactatcacagcgagaactggcagaactgtcaggagtatctgtgcggcagatacaactctttgagcaaagacagagagatatcaatcagaccagagcaattgatgtgttgcgattgagcagggcgcttggatgcaagaatgaagatttgctggaactatgaggatcaggctaaagcaaagaatcgtctaaagacagcgagatatgggaaagacctgtatctcgctgttaaaatagatgctcctgagttggtgttttaggaaattgtcttaaggactctttttagaattgaagtcagaacaggggcagttattgcagtaaagatcattccaggagctgcgcttactactaaaggctgccaggcaacacccaagattgttgccaataccagtctggctgcaaacgttccggcaggaccagcaataatgagggccagtgggtccttttttaatactgttaagataagaccggctacaatacggtacaccattgcgataatgacattgtatatagtctgaagacctaatatcatcccaataatgctggcaatgatgccgatggtaagataatgtagaaatcctctgattcttccgatgcttatggctaatggggctgataattgaaattcagttcctggaatgggtgatgggattttaaataagcccgagatgaacagcagaacaacccacatgccgtccatagtcagatttttgacgctaaaaaaatgattggataaaattctttcttttgattcttctgtagtactcatagttttcccatccttttgtttaaaatatttctgccatttcccattgagagagattaaaagcaaagttattgtatacaataagcaactaattgtcaaccattaaataaaaaaaggttgacaattagttgcgagtaagtatatactttgcctaaagtatgcaagaaaaaaggagaatgcaatgggaaaagggatatttgtaaccggtacaggtacggatgttggtaaaacatacgttacaggattgattataaaaaagataaaagagaacgggatgactccaggctattttaaagctgctatgagtggaaatgaaagaaaggaagatggaacgctgattcctggtgacgctttgtgggttaagaatgtatcaggaatctcccagtcagtagaggaaatgtgcccgtatgtctatgagcatgcttattctccgcatctggcttcacgtctggaaggaaatcatgttgagatggcagttgttttggataattatagaaaagtaaaagagaaatacgactatataacagttgagggaagtggcggtattttatgtccgatctgttttgatgaggcacgtattgggttgacagatataatagatgagatggaacttgactgcattctggttgcagatgcaggacttggaacaatcaatagtgttgtactaacttatgaatatatgaaaaacagaaatatgaatataaaaggaatgatttttaatcattatatagcggataatatcatgcatgaagataatatacgcatgtgcgaatatatgacggggcttccaactctggcgaaagtttccatgggagacgtggacttgaatattgatatagcagaattaatttcattatacagataacaatataacggaatgaggaaagcaaaaataagaataattttaggagataaacttatgatctggtatccatatgtacagatgaagaaaatgaagacaccatataaaattgtagatgcagaaggagtttatttgtatacgcaggataataaaatgatagattccgtatcttcctggtggtgtatgatacatggctataaaaataaagaaattaacgaagcaatgaagaatcagattgatcaattcagtcatgtcatgctgggtgggcttactcatgaaccagtcttgaaattatcagaaaaactaaaagattttctcccgggagatcttgattactgttttttttcagattcgggttcggttgctgtagaggttgccttgaaaatggcattgcaatttaatattaatcgtggcagcggaagaaaaaaactcctttcgcttaccaactcgtatcatggagatacatttatgtgtatgaaggccggagatgatgaggattatcattttatattatcagaagatgataagaaggatgtaattcacattccaacggaaatggatgcattggaaaaagtatttcggacacacggaaatgaattttatgcatttattgtagagccacttcttcagggagccggcgggatgaaaatgtatagtattgatttcctgagaagggcaagagaactttgcaatgaatatgatgttgtttttatatttgatgaagttgcaactggtttcggacgtactggaaatcgttttgtgtctgatcttgtacttccggatattatcgtgcttggaaaagcattgactgccgggtatataggacatgcggtgacagtagcaaatcataaaatatataatggattctattctgataaggatacagatgcacttatgcatggtcctacatttatgggaaatccggtcgcatgcagtgcagcattaaaatctatagaaatatttgagcgtgaaaactatatggaaaaaatcaagcatatagaggatatggttagaaatctggtctccggattcactcatccgcttatcaaagaaatcagatatatgggtggttgtctttgtttccaggtacatgacccatcatgtcttatcggatttcaggagtatgcatatcaacgaggagtattttcaagaccatttctcgatattatgtatgccatgtttccgtatatcatacaggataatgagatcaggcagattgttgatgtcatgaaagactggttcactgaacagaaaggaatttaatctatgagtgcggaggaattgtacagtattaagatgcgtgcaagcaaaaaggaaaacggtacggatgtacacatatccggagcagagaaaatcgttgaggcaccggatgttgatatatttgccaatgcgctgatagagagaggaatgcatcattccaagggtgaagcagatgcgttgaacttgaagataaataaagtctgcaaggagaacattatttatcttgatgcactttcagtagagacaattgaggtcgaaacatgggaaaaagggcaggaagagataaaaaaatatttaaaagaaactggaatagacaatccgcaagatgtcatgcaattcttagatgaaacttatgccatgagaggagctatgcttcttgatgttgacaggctcattcgtttagaaccggataaaaaacgtgggattcgtgctaccaatatggatcaggagagaatgaaaggggacagaatcggaaacgagaagaatcattatgaagaagcaattgtacttgcgacaaaagtggcaaattgtcctggtattattggtgagatatgtatttcagatgatcccgagtacgtgaccggttatgtgagctcaaaagaaatcggttatagaagaatcacgaagatgaagagaatggggagcgaaaaaggaggaagaatatttctgtttcgaggaacagatgcagaagaacaaaaagcaattgattttcttcagaatcagcatgtaatcgtcagaaatgtacccaaaaagatttgcaaaaaatcagatatgaaaagaccacagaagtgggataaaattgataaagcactggtatctttaaaagaaaatcatctttttcgcacaatgaagacaatagaatcagcacagagttcacatgtaactatagatggaaaagattatgtattaatggcatccaataactacctggatattgccagtcatccttccataaaatcagcagtcgtagaatcgacagctatgtatggatttggctccggtggctccagacttacaaccggaaatacagtgatacataatgcactggagaataagattgcttcctacaaggaaacagaagcagcgatcgtgtttaacacaggatatgttgcaaatgtagcaacaatatccgcaatggtgaaaaaaggagatactgtttttagtgatgaattaaatcatgcaagtattattgatggatgccgtctttcaaaagccaaaattgtaacatatgctcataatgatatggatgatctgcgaaaaaaaatacaagagaatccatgtgagacaggcattgttgtcagtgatgcagttttttctatggatggagatatattaaagcttccggaatttcttgatatctgtgaagagaatcaattgttttccatggtagatgaagcacattccacaggagtgatcggcaaaaccggtcatggaatccgggaatactggcaggaaaaaagacaggtagatattttaatgggaacatttagtaagtcgataggtggcgaaggtggttatgtggccggagagacaagactgataaactatctgagaaatgtggcaagaggattcatattttctacttcactttcgccagtaaccatggctgcgaatctggctggaatcgaagttcttgaaaaggaaatctcaagagtaacaaaattgcagtacaatgtaaaatatttttgtagacaactcgggaaatatggtatcaatgtaaaatctgaaactgccataattcctgttattattggtgatgaggaaaatgcactgacagtttccaactatcttcatgagaatggatattttatatcagcgatacgttatccaactgttgctaaaggagcagcaaggcttagagtcgcgcttatgtccagccatacagaagcagaactgaaaaagtgtgcagaattaataggaaaagccttattgatgaagtaaaaatatgttaacactttaggagtgaataatcatccaaagacagcgagatatggaaaagacctgtatctcgctgtctttttattaagaaattcttagttttcatctgcaacagtttttttatttgtagactctagtgtatataacctataataaagataatgtgaaactattcatagacttcatgaaccaatacaggtgattcacaaaaatggttataagaatcttcaaatgaaaaagatgattcgagaggagggaacgaatgaaggataaagaaaattcaagggaaatacaattcaaagaggaattggttcgcaaggccaagaatggagatacgaaagcattttccctgttatatgccggcgtttgcaaggaaatgtataaattcgcattatatatgatgaagcatacagaagatgcagaagacgcggtaagtgagaccgttatatctgcatttgaaaatattgcgaagctcaagaatgagagtagttttaaaagctggatctttacaattttaggaaatcaatgcagaaaaatgttgggaaagcgtggaaatcatgtgtcagaggaagagacaccagaggctggacacgaaccggactatgagcaacattttgatgtgaaggaggcattcgcaaggcttgaggaagaagagcgtatgatcctttcgtattctgtattcgctggatatggaagtgaggaaattgcgcagatgcttgagatgaatgcagcaacggttcgatcaaagaaaagcagggcacttgggaagatgcgtaagatgttggaagcaggatgatctataagagctggagttgaaaaaaatagaagaaggaggcggaaaagatggaagaaaatagagaaaagaacaataagaagattgagaatgaaaagcgtttagaacaagatttgagacagatggcagatgatgtgatccttccggactcactggagccggaggcaattcagaaaatgcttcaggcaagacaggaagaaaagcagcagggatcaaaaacgaaaaagaacaaaaagaactggaaacgtatcgttccgatcgcagcggcggcatgtgtctgtgtgatagttggagcgacagttggaatcaagcagatcaacaaaggaaacaacaaaacattagatgcagcgactatcgcatcagcagcagatcagaaagagacaacccagacacttataacagcgaaagattataaagaaattgaaaaatgtatcaaagagtacaataagcagatggcacgggacaacaacagtatggccattggaatgtatgaaagtgcatcttcatcagacgcagcatcagcagaaagtagtaatgttagtgataccggagcttattcagatacgaatctccgtgagaacggcgtgggggaagccgatattgtcaaaaccgatggaaaaaacatttatacactgtgtcggagtgttgtgacaatcacagctattgacaaagagtccatggaaaagctggcctcgatcgaacaggatgcagaacgctatgtagaagacatttatgtacaggatgataaattagttctgttcggtacgttaggaagacaagtcggaaattcagaggattcagaagcttatgatggatattatgagaacaatacgtatgtccaggtatatgacatcagtgacccgtcaaatccgaaagagatcggtaacatggaacagagcggaggatataatacatccaggattgttgatggatatgtctatgtgcttagtcagttccatccttacgaagacaatgttacagcaagagatctgtggtatattccggaagtgcagggaaaatctattgaagcagaaaatatttatatgccacaggaagcagaaggaaatgaatatacgatcattacagcattttcattagataatccatcagaaaaaacagacagtaaggctgtttttggttattcggatgtgtgttatgtaagcgaaaataatatttatattacaagtaattattatgaagattcagatgtgagcagaacattgatccgcaagatttcttatacagatggaaagcttgttggtgttgctcagacgaagatcaaaggaatgctgaacgattctttcagcattgatgagtatgaaggaaaccttagattagttacaacaatcgatgagatttattcgaatgatgatattatgccattaaatgagacggcagataagactgaaaaagccgttgctgaaaatgttaaggatgcggtacctggtacaaattcactttatgtactgaatgacaaactggagatcattggctccattcacaatctggcaaaggatgaaacaatctattccgcaagatttatgggagatacaggatatttcgttacttaccgtcaggtggatccattgttctcggtagacctttcagacccggagaatccgaagattcttggagagcttaagattcctggattttccgaatatctgcatccatatggagacggaaaactgcttggcatagggatggatgtaagtgaagatggatttacaacagaaggtgtgaaactttcgatgtttaatgttacagatccatccaatgtaacagaggaaaataagtatacaattgaagaaagctatggcacagatgtaggatacaattataaaggtgtatttgtagatgttcagaagaatctgttcgggtttgttacctatcatgatggagtgacttatcagttgtatacgtatgatgaggcagaaggattcaaagaagtcatgagcagacagctgagcggatatgaaggcagcagaggactgtatattggtgacgtattctatcttgtaagcggaaatatgatagaatcttattccatgaatggatttgagaagatggatgatattgttctgtaaataatttgtaactgttcagagctaacctccaaaatactacgcattttggaggttggcgtatccgccaaataaaatttcaaaaacagtttaaaaaatgcaagtattttatacctttttttgaaattttgcttggctctgaacagttacaatattttggattgacagtttgtaagacgaaaattatactaataggagatggaatttgtttgaaattgtagttttgtaataagagaaaaggggttagaaattatgagttccagaaataaaggaatttgctttattatattgtcggcattttcatttgcgttaatgggtgcctgtgtcaggcttgcgggggatgtgccgtccatacagaaaagctttttccgaaatctggttgcattctttgttgcacttataatgactgtgcgaagtggtgacggatttgaaatcaagaagggaaacttaggttatatggttttgcgtgcaacatttggcacgctgggaatcctttgtaatttttatgcagtagatcatctggtactttcagatgcatctatgctgaacaaaatgtctccgttttttgttattttattttcgtttcttctgttgaaagagaaattaaaaccggcgcaggcaattgcaatttttgttgcatttatcggaagcctgtttatcattaagccaacctttacaaatatggaactctttccgtcagtgatcggtctatgtgggggaatcggtgccggtattgcgtatgcaatggtaaggattcttggtcagagaggtcagaaaggaagctctgttgttctgtttttctcagggttttcctgcatcgtgacacttccgtatctgttatttaatttccatccaatgacaggagcgcagattctggcactgtttggtgccggacttgcggcagcaggaggacaatttggaattaccgcagcatattatcatgcacctgcgaaagagatatcaatctatgattattctcagattattttctctacgattctcggatattttcttttcggacaggttccggacaagtacagtgtgcttggatatgtgatcattctcacaatggcggcatggatgttcttctataataaaagaccggaagaaaaagaatagaaactgtttgaagccaaatatatttcagatgaaaaggattataaaatcatggattttgcaagacttgagaaaaatattatagatgtaataaaggaagaacaggcgaagctgggctaccgtaaggagaagattcgtctgtattatccgctgagttctctgaatcatttctttcagttagatgtggatgagacaggaatgcaggaaaaattgagccggttttctgagtatgaagaagggaagcttggaagtgttgaagtgacaaataagggggagcggttctgttttcatattccggaggaaggtgcagaatatgtacacaataatatgaaagagaatgaattcatcaaagacctgattgggttgatctctcatcatggctgcaagatgcaagatatctttgaactgttccgtcagcattcggatcagattacgatcgaagagatgcacagcgatgaatttgattatatgatctgctttgaaaatgatccggaggatacttaccggtattgctttaaagatgaaggatgccatatcatttaccatagattcctgccggaagattatgaagaatttggatttggaaaataactgtcaggtcagacaaaaaggagaaaaaagtgaagcttacaatacttggaacaggaaatgcaaccgttacggagtgctataacacatgctttgtgatcagtgataacgaccgtcattttatggtagacggtggtggcggaaatacgattcttcatcagttgaaagcagcgggaattaactggatggatatgagagatatttttgtgacacataagcatatcgatcatcttcttggaatcatctggatgatgcgtatgattctccagaatatgaatagaggaaaatacgaaggagaagctacaatttacggacacgaagaagtaatccgtattctgaaagagatggcaggtgaagttctttcggcgaaggagatgaaatatatagatgatcgtcttcacatggtcgtagtagaagatggagaagaacgtgagattattggaaagaaagtaacatttttcgatattcactctacaaaggcaaaacagtttggattttgtatgcggttagatgaggatgagaaactgacctgttgcggagatgagccgtacaatgaattagagcagaagtatgctgagaacagtacatggctcttacatgaggcattctgtctctacggacaggcagatgaattcaagccatatgaaaagcatcactccacagtaaaagatgcatgtgagatggcagcagacctgaatgtggagaatctgattctgtatcatacagaagataagaatattgaacacagacaggagttgtatctggaagaaggcaaagcttattatgacggaaatctgtttgtgccgtatgatctggatgtaatagaactataagaaatttaatcccacagcaagtttgttatatgctatactttgtttatgatcaggttgaattgataaattcagggagaggtgaaggagaatgcttgagttagtaacaggaggcagcggaagcggaaaatcagcttatgcggaaagccggatctgtgaatggaacaggcaggatccgaagcctctcttttatattgcaaccatgtatccttatggggaagagacagaaaagaagattgagagacatcggatgcttcgtaaaggaaaagggtttgagacattagagtggtatacaggacttaagctacatttggaagagggatcattacaaggctcagatgtgcttctcgaatgtatgtcgaatctcgtggcaaatgaaatgtatatggaatccggtgcaggatgtcatgcagatcaagccattctggaagggatccgagaattgaatcaacagtgttcgaatctggtgatcgtgacaaatgaagtgttttccgaatcggttccggattcgccggagatgaaagaatacaaaaggattcttggcaggatcaactgtgaaattgcagcgatggcagatcaggtgacagaagtcatttatggaattgcacagcagaaaaaggaactagatacgatggtcaatagaacagaaaaaccgggcgtggacagtaacaaatcaggagagtcggtgatgtgtcagaaagaaaatagagctcatataattataggtggtgcattccagggaaaagcacagtatgcaacgaaaatttatccgggacttgagctgacagacgggatcaattgttcgctggatgagattgaaaattgtgtggcaatcaataaattccattcatttacaaggcgctggcttttggaaggaagaacaaaggaagcgttactgacgatacttgagaacaatagaagccttcaattattaattagtgacgagataggatacggtcttgtacctatcgatgattttgaaagagaatacagggaatttcacgggcgtgtcatgacggaacttgcagaacaggcagattgtgtagaacgtgttgtgtgtgggattccgcagagaataaagtgaaaggaaattagagatgctttcagagatagaacaggtacttccttctgaaatagagaagagaagttttgagattataacagaagaattaaaagagatgggaaagattctctgtccggagacagaactgatcgtgaaacgctgtattcacacaagcgctgattttgagtatgcggacagtcttgtttttacagaaggtgttgtggagaaagcaaaggatgctatccgcagaggtgtgccgattattacagatacacagatgggaaaagcaggaattaataagaaacgtctggcagagtatggcagtgaagtgctttgttttatgtcggatgaagatgtggcagagatggcgaaaaagaatggcacaacaagagcggtggcaagtatggataaggcagctgcactgggaagagaggctatctttgcagttggaaatgcaccgacagctttagtacggctttatgagttgatcaaagaaggaaagattaatccggaattaatcattgcagttccggtagggtttgtaaatgtcgtgcagtcaaaggaactgatcttaagtctggaagatacaccgtcgatcgtggcacggggaagaaaaggtggaagcaatattgccgcatgtatttgcaatgctttattatatcagatgtaaaacagatgcaaaaaaactttgttagaacttgttagaaagatagaatagtggtattataagactgtttgattagaaaaaagaatagagagggaacaaaacgtgacctataaagaagcaagggtatatttggacgagatgtcgaaatacggaagtgtacttggcttagatacgattcgaggtctgttgcgtgagcttgggaatccacaggatgacttaaagtttatacacattgcaggaacgaatggcaagggatctgtgcttgcatacacttcaacaatattaagtgaggcaggatacagaaccgggcgctatgtctcaccgacagtaatctcttatctggagcggattcagattgacggaacatggattccggaagatgaatttgcagaattgacagagaatgtaaaagaagctattgcccggatggaggcggccggagaggaatctccgacagtctttgaagcagaaacggcaatagcttttctgtattttaagaagaaaaaatgtgatctggttgtactggagtccggtcttggaggaattctggatgcgacgaacatcatcggagcaccggtgtgtgcagcatttgcaacgatcagtgtggatcatcttggtgtgatcggagattcgttggaagagattgcgcagaacaaggctggaatcattaagccgggatgtgcagtagtatctgcaaagcagaaagaaaatgtccgggagattctgaaaaaaactgcagaagaaaaaggctgtcctttcacagaagcacagcctgaacagatgatgatttttgaagattcctaccacggaattacattttcttataaagaatatgaaaagatgcatagtccgcttgcaggccagtgtcagagagagaatcttgcaacagcgctcgaagttatccgctgtctgaacagactggggtatcgaattacagaagcgcaggtgcgagagggactttcaaagacgagatggacaggaaggtttacctgcctgtcagagtccccgttatttttcgtagacggagcgcataatgaagacgcagcattaaagctgaaagtgacggtagaacgttatttttcggattataagaaaatctttatcatgggagtctttaaagataaagaatatgagaaaatcacgtctattctttgcccgttggcagaaagtatatatactgttagtcttccaaataaggagaggacgcttccggcagaaaagctggcagaagtagtgaagaaacattgtcagaaagtgaaagctgaacagaccatcgaaacagctgtagaggatgcaagtaaagaggcaatgacccaaggcaaggatactgcgcagaaaactgtgattcttgcatgcggatccctgtcttatcttggagaggttcagcggatcgtgttgaataaccggcagtgagatataggagagaaatataaaatgatagatcatgaaaaagtagaacaggcagtccgtcttttgttggaaggaatcggtgaagatgtgaaccgcgaaggtcttatagatacacctgacaggatcgccagaatgtatgaagagatatatggtggaatggaagaagatgcgggagttcatcttatgaagacatttacggtagaaagcagtgagatggtgatagagaaagatattacattctattcaacctgtgagcatcatttactgcctttttatggaaaagcccatattgcctatattccggatggtaaggtggtaggactgagtaagctggcgcgtacggtagaagtatttgcaagaagacttcagctccaggagcagctgacaggacagattgcagacgcattgatggagtatatgcagccgaagggagctctcgttatggtggaagcagagcatatgtgtatgacaatgcgcggaatcaagaaaccgggaagccagacagttacgttggcacggagaggtgtgtttgagacagacccgacattagaagaaagattcttccgtatgcttggaagataaagaatacgtaaaggaaaagaagtgaacagacttgaaacaggaaaatatgtatcggttaaatgaagtggtccatcactggatctatcaggattattatggaagaatcaagcggttagagaaggagcgtatcttttgctgtcatcagatgacacatcttctggatgtagcaaggatcgcatatattaaaaatctggaagagaaccttgggtttgagaaagatgtgatctatacggcagcagtacttcatgacattggaaaatcatttcaatataaatggacaattccgcatgaagtagctggagaaaagattgcaaaagagattttaacaacattacctgaagatgcacagtttacagaagaggaacagcagcagattcttttggctatccgtggtcatcgcagaaaacatgagggaatggaaccgattgaggaattgttttatgatagtgataaacgctcgcgtatgtgccattcctgtccggcacagaaacagtgtaactggacggaagaagagaagaatatggagatagagatatgagaattggcggaaaagaatttgacctgaagaaaaatacctatatcatgggaattctgaatgtaacaccggattccttttctgacggaggaagatacgacggactggatcttgcgatcgaacatgcgaagcagatgattcaggaaggtgtggacatcattgatgtcggtggagaatcaactcgtccgggacatgtacagattacagaagaggaagaaattgcgcgtgttgttccagtaatccgaaaactcaaagaagaatttgatattccggtatcgattgatacttataaaagtgcagttgcagcagcggcaattgaagcaggtgcggatcttgtgaatgatatctggggattaaaatacgattctaagatggcaggattgatcgcaagaacaggagtagcgtgttgtctgatgcataatcgtgagaatacagattatcagaatttccttgcagactttatggatgacatgaaagaatgtgtgaagattgcgaaggacgcggggattgcagatgataggatcattcttgatccaggcgttggatttggcaagacatacgagatgaatctcgaaattattgataaacttgaaatcatgaaagaacttggatatccggtacttcttggaacttcaagaaaatcagtgatcggtctgacactggatcttccggtagaagaacgtgaagagggaacaatggttacaacagtttacggagtgcagaagggttgtgcatttgtccgtgttcatgatgtggagaagaataagagagcaatccgtatgacaagagcattaatgagagaacatgaggtataggggacagatgcagaagaagttcgatgaaatcagaattgaagatttggaagtgtttgcaaatcatggtgtgtttccggaggaaaatacgttaggacagaagtttgttgtctcagcagtgctttttacagataccaggatggcgggaaaaacagatgatctgacagcgtccatccactacggagaagtcagtgcatttattactgaatttttacagaaaaacacctatcagttattagaacgtgcagcggaagaactggctgaagcgttgcttcttgagtgggacagaatagaaagagtatctctggagattaagaaaccatgggctcctgttcgactgccgctaaaaacagttagtgtaaagattgaacgtgaatggcacacagcttatattgcattaggatcgaacattggagatagcaagtcatatctggattatgcggtgaaagcattgaataaacttccgacgagtcaagttgagatcgtatctgaataccttgtgacaccaccatatggagtgacagatcagcctgatttcctgaacggctgcctgaaacttcgcacgttgctttatccatatgagcttttagctgaattgaacagaatcgagaaagaagcaggaagagagcgaatcattcattggggaccgagaacgcttgaccttgatattatattttatgacgatctcgttcttgaagaagtagatctgtgtattccgcatgtagagatgcacaagagaaaatttgtgctggagccgttgggagagattgctccgtataagcgtcatccgatcaatggaaaaagagtttgtgagatgcttgctgaattgaatgaaaatgagaattaatcgaattattaaaaaggcttattaccagttatcataaaaggtgataagccttttggatgtaaagtgtgaagaaatatgttacaataaccgaggttataaaaaggacctagagggaaaggagagggcgaaatgttagaaaaaatatttaagctttctgaaaacaaaacagatgtaaaaactgaaattcttgccggaattacgacattcatgactatggcgtatatcctggcggtgaatccgagtatcctgtcggcggcaggaatggattcaggtgcagtatttactgcaacagcattagctgcatttataggaacacttctcatggctgcacttgcgaattatccatttgcactggcaccgggaatgggactgaatgcatactttgcctatacagttgttatcggtatgggatacagttgggaatatgcattgactgcagtatttgcagaaggtattatctttatccttctgtctgtaacaaatgtacgtgaggcaatctttaatgcaattccgaagaatctgaaatctgcagttagtgtaggaatcggattatttatcgcatttgtaggtctccagaatgcacatatcgttatgggtggtgctacattagttgaattgttctctttagatggatataatcagctgaatggtgtgagtgcaacaatgaacgatatcggaatcacagttattcttgcgcttgttggaattttgatcactggaattcttgtaatcaagaatgtgaaaggaaatattctttggggtattttgatcacatgggcaatcggtattgtttgtcagttcgcaggaatttatgttccgaatgcagaagttggatgcttcagcctgcttccggatttcagtcacggattatctattccaagtattacaccgattttctgtaaacttcagtttaagggaatctttactttggactttgttgtaatcctttgtgcgttcttatttgtcgatctgtttgatacgatcggaacacttgtaggagtttcttcaaaggcaggaatgcttgacgaagaaggaaaacttccaaagatcaaaggagcgcttcttgcagatgcacttgcaacaacagcgggagctgttcttggaacatcaacaactacaacattcgtagagagtgcttcaggagtatctgagggaggaagaacaggtcttacagcagtgacaacagcaatcttgtttggtcttgcattgttcctgtcaccaattttccttgcaattccggcatttgctacagcaccggcactgatcattgtaggactttacatgctgacgaatattacaaacattgatttcaatgatttgtcagaagcaattccttgctatgtatgtatcattgcaatgccattcttctatagtatttcagaaggaatctcaatgggaatcatcacatatgtggttctgaatctgttaacaggaaaagcaaaagagaagaaactaagtcttctgatgtatattttagcaattctgtttgttttgaaatatgcattcctgtaaatgggattgaatgacgtcagaaagatatcaaaataaaaatagaaaaaatcaagagctggacagaagtatattgaaaacttctgttcagctctttgtggttgaaaaatgtctgagcaactcttttagagcagttgctcaaaggtgtcataaaatgttgggtaagacacatctacgcatttactgtcaagaatctttgtagtaccttctgtaacaagtgcagcaatactgaatgccattgcaattctgtggtctaacaaagtatgaatagaagcaccatgaagaggtcttccgccattgatgatcattccgtcttcagtaggtgttacatcacagcccattgctttcagattatctgttacagtctcaatacgatctgtttccttgactttcagttcagcagcatctttgattacggttgttccttctgctacagctgccatgaccgcaataaccggaatctcatcgatcaaagttgggatgatgtccccttcgattgtagttccatgcagtctacttgtgcggacaagaacatctgcaattctttccccaccttctgtacgttcgttaaggagggtgatatcaccacccatatcttcacatactctcaagattcctgcacgtgtcgggttgattcctacattttctacaagaatttcagaatcagggacgatcagtccggcagcaatgaaataagcagcggaagagatgtctcccggaactgtgattttctgtccgtaaagttcttcacaaggacggatgatagcggttgctttggaagaaccaatctcaaaagtagagcggatatttgcaccgaattctttcagcattaattctgtatggtttctggaaagactcggttctgtgacagaggtctctccatctgcgtaaagaccggcgagcagcagacaagattttacctgcgcactggcaaccggcgaatcataatggattccatgaagctgcgcaggggtaatataaagcggggcacatccattgcggagaatactggaaatatgtgcgcccatctgtgtcaatggttcaatgattcttttcattgggcgggagttcagtgattcatctccggacaatttagagtcaaacggctgtccggcgagaataccggaaatcagtctcgttgttgttccgctgttttccacatcaaggatcttctccggagcactcagtccatgcaatccctttccgtgtacgataacggaagaataatcgctctcaacttcaatctcaataccaagctctctgaaacaacggatagtcgcgagacagtcggcaccagagagaaagttgtggatctgcgttgttccgtttgcaatcgagccgaacataatgcagcggtgggagatggatttgtctcccggtattgtaacttttccttttaatcctgtaatattacataattccataatcttattcctcatttctgctatcagacttcatagatgacatagcggtatttctgcaaaagtacagaagctctgtttgcagaatcttcatcataaaattcaatacgaagaactccttcctcgaattcacggttgtggatgattccgatattcttgatactgatgttattacttgcaagaattgtggcaatcgtagcaattccacctgtttcatcgatgatatcacaataaagtgcaaactgctttttgatcggtcctgcagatccgttcggcatggagttcctgtaatctttggaattctcaaacagagcgtacagggcaggttcatttccttcatccacaagatcctttgcatgtgaaagagcttcaatatattcacctaagatctgggagatgttctcactgtttttcagacagatctgctgccacatgaccggggaggaagaagcaattctcgtaatatctttaaatccccctgcggccaacgatttcatcatcccttccttcgaatccgtatcatgtacaaaattcacaagtgtggatgcaataatatgcggcaggtggctgatcgttccggtaatatgatcatgctcgtggtaatccaaaataacaggaagagcttttaatgatgaaacaaagtctttgtaagcatccactttttcttccgctactttagcagaaggagtcaggatatagtatgcattttcaatcaaatgagctttggaattcataaatccgctcttctcagaaccagccatcggatgtccgccaatgaaattcgcttccattcccagacggattacctcttcgtggatggaagtcttcacgcttccgacatctgtgagaatacagttttcatccaggagatctttcagctgggaaagataggctgcattgtaagtgaccggtgcacagaggaaaatgtagttacatcccctgaaattgtcatcaatggatgaacaggaagtatgaatcgtgccttcctgaattgccagtgcaagggattctttatttttatcgaatgcgatgatgtcgtaatccggataatactggcggattgccttcgcaatagagccgccgataagtccaagtccgataaatccaatttttttagcattcatagttgtaaaatcctttctgttgttgtgcaaaacatatcttactgttcagaaatcttaaatcagtaagaaacatatattcgtattttaacactttgctctgtaaaagtaaattattattcacaaatgcctctggttctaatctttgaccagataattttgtggataaaagttaaaattgtataaaatgtaaaaaatagttgtaattaatctgaatatttagtacaatatacccatggcatgtatatcaacgacagaaaatgatgtacataatagctacataacaaggaggcagcagtatgaaggtttacagaacagacgaaatcagaaatgtggtattacttggtcatggtggaagcggaaagacaagtcttgcagaggcgatgctctacgtatcaggtgcaacgaatcgtatgggaaagatttccgaatccaatacggtgagcgattttgataaagaggagcagaaacgaggattttcaatcagcacaagtctggtaccgatcgagtgggagaaagcgaagatcaatattcttgacacaccgggatattttgattttgtcggagaagtagaagaggcagtcagtgcagcagatgcagcggttatcgtagtatctggtaaggcaggagtacaggttggaacggaaaaagcatgggagctttgtgacaaatataatctgccgagaatgatctatgtgacagagatggatgtggatgatgcaagtttccgtcaggtagtagcagatctgacagagagatatggaaagaaaatcgcaccacatttccagccgatccgtgagaacgagaaacttgtaggatacattaatattattaagaatgccggaagaagatatacaggcattggacagagagaagagtgcgagattccggattactgtatgccgaaccttgagattttgagagattctcttatggaagctgtagcagagacaagtgaagagtttatggagcgctattttaatggtgaggaattctctgtagaagagatccgtgcagccatgagaacagaagtaatggatggagatatcgtaccggttgcgatgggatccaatgtccaggcacagggagtagccaacctgctttcagatattgttcgtttcttcccgagtccggataagagaacctgtgcaggaatcaaccgcagaacaaacgagatctttgaagcgaattatgatttcgcaaaagcaaaatcagcgtatgtatttaagacaatggtggatccatttattggaaaatactcttttgtaaaggtatgctccggagtacttaaaggagatgatgtactttataatgcagacacagacgcagaagagaaaccaggtaaactttataccatgtgcggaagtaagccgagcgaagtgacagagctttttgcaggcgatatcggagcaatcggtaaactgacaaatacaagaacaggagatactctttccgtaaagggaacaccggtatcttacgcaaagacagattattctgtaccatatacatatatgaagtatcgcgtaaagaataaaggcgatgaagataaggtatcacaggctcttgcaagaatgacagcagaagatgttacattgaaagctgtgaatgacagtgagaacagacagtctcttctttatggaatgggtgagcagcaccttgagatcgtggcaagtaaactggcggcaagatataaagtagagatcacactggagacaccaaaagttgcattccgtgagacaatccgtaagaattctgacgttgattccaagtataagaaacagagcggcggacatggacagtacggacatgttaagatgaaattcgaaccgtcaggtgatcttgaaactccatttgtattcgaagaatgtgtcgttggaggagcagttccgaagaactacttcccggcagtagagaaaggtctgcaggaatctgtagtgaaaggacctcttgccggatatccggtagttggtgtgaaagctactttatacgacggatcctatcatccggtagactcttcagagatggcatttaagacagctacgatccaggcattcaagaaaggattcatggaggcatctccggtacttcttgaaccaatcgcatccctgaaagttacagttccggatgattacacaggagatatcatgggagacctgaacaaacgcagaggacgtgtgcttggcatgataccggtagccggagggaagcaggttattgaagcagatattccaatgacaggactgtttggctattgcacaacacttcgctccatgacaggtggaagaggatcttacgaatatacatttgcaagatatgagcaggctccatctgatgtacaggagaaagaaattgctgcaagagcagaagaagcataattaaagattcaggcaatataaagagtgtgttatccggctgataaaaaggagtggatagcacgctcttattgcttgttttagaaaaaaacggtaacattgtatttcacaaaaaaatcacaagtttgcgaatatggttgtactttcaaaacaaaggtgctataattcatctgcctgtctacattagacaggtatgttattgtttatgaaatcctgtgaacagtgacataaagtgactgtgtagagcagttataacattattataataatatgagggataggaaaatgaggattattattatcggtgacggaaaggttggttacaagcttgccaagcaactttccgccgagaaatacgacattgtaatgattgacagtaatgagaataagttgagatttgctatggatcgtctggatatcgcctgcgtgacgggagatggcgcagacgcagaagtacttaaacaggcagatgtggcgcatgctgatctggtgattgcctgtacatcagcagatgaatgcaatatgttaagctgtctgatcgccagaaaattaggtgcaagacatacgattgcccgtgtgcgtaatccgatttattatcgtcagatcggacttctgaaagaagatctgcatcttagcatggctgtaaacccggaacttatcgtggcagatgagattagcagacttctgctcttcccggatgcgagtcaggtggagacttttgtaaagggacgtgtagaattgattgaattaccggttgcggagggaagtagcctggcagggttaagccttgcggaaatgtataaccggttccagatccgtctgcttgtctgtgcagtggaacacggagatgaagttcgaattccggatggagaatacaggatgcgtgcaggagaccgtctgcatattgcggcatctcataaagatttagaggcattttttaaagcaaatggaaagcgtaaggacaaaatcaaaaaagtcattatttgtggagccggaagagttggttactatcttgcacttcagcttagcacacttggtatgcaggtgaagattatagaacagaatcgccaaagatgtgaagaactttgcgaattacttccaaaagcaaccatcattaatggagatgcaacagatcacgaccttcttgtagaagaagggattgatgaagcggatgcatttgttgccctgacagggatggatgaagagaacattatactttctctttttgcaaagagtcagaatgtggacaaaattgttacgaaagtcaatgaagatagacgcgcacgtatggtagaagactttggaattgatagtattgtttctgttaaaacagctacagcagacgcaatcatgagttatgtcagagcgcgtaaaaactctcagggaagtgcgaatgttgagacaatgtatcaattggttgatgacaaagttgaagcactggaatttattgttaaggctgagacaaattatacaggaattccattgaagaatctctcgttgaaaccgaataatctgattgcatgtattgcaagaaaacgtcagatcattcttccaagcggagaggattgtattcaggtaggagataatgtgatcattatcacgatggaaaaacggattgaagatattaaagatattttaatgtaggtgcagcgcgatgaataagaagatgatagtatatattttggggaaaatgatgggagtcgaaggattacttcttctgatcccagcgttggtttcccttatatatcatgaaaaaagcgtaatttcttttctgattgtagcagcaatcctgctcgcaatttatatggtgtttggaaggaaacttccggcttcaaagcagatttacggaaaagaaggttttgttattgttgggcttgcatggattttatggtccgcattcggagcacttccgtttgtaatttcgggaagtattccacattatattgatgcgctttttgagacgatttccggttttacaacaaccggatctacaatcctggtagatatcgaggctctgccaatgggaatttccttctggcgaagctttacacactggatcggtggtatgggagtacttgtatttgttatgatgatcacatctttggatgatgagaatgcaatgccgctcatgcgtgcggaagtaccgggaccggaggcagataagcttgtaccaaaggcaagacatacggcacggattttgtatggaatgtactttgtactgacagcagcagaagtggttttcctgctctttggcggaatgaacctgtatgatgcacttttacatgcattcagtactgccggaacgggaggattttctaatagagctgcaagcgtcagcttctacgacagtgcatatattgatggtgtgatcacagtatttatgattttgtttggaattaactttaacttgtactttttcatattgctcaaagactggaaatccattctgaaaaatgaagagctgtgggcatatcttggaatagtaggtgtgtcaatcgctataatcacaggaaatatcctcaagatttatggaacggttgcacatgcattccgttatgcatctttccaggtcggttcgatcattacgacaaccggatttgcaaccgcagattatgaccagtggccggaactctcgaaatcaatattattggcacttatgtttgtgggagcctgtgcaggatccaccggaggaggtattaaagtaagccgtttgctgatcattgtgaaatcaatccgcagagaagtgcgtaagatgttacatccgaacgccgttacaatcatcaaagtcaatggcaaaaaaatcggacaggatacattgaagaatgtaaatctctatctgacgtgttacattatgattctgatcgtatcaattttacttgtttctattgataattttgattttgcgacaacatttagtggggtactcacaacgatgagcaatgtaggaccaggtatttcaaaggttggtccggtgatgaatttccacccattctcagcattatccaagctggtattctgctttgatatgctgattggaagattagagatcttcccatacctgcttcttctttctccggaactctggagaagaagattctagacgatttttgttaatcatgtgcggaaaaattggaatgaaatagattttttcgcacattttatttttatatattagaaagctttcctaatatataaaaacgctccgctaggtggcgcaagcgactgccacagacgcaagaatgtgccttggcacattctttgttctatggtaaaatgaaagaaccttgttgaagaaaggaagaggtgagatgaacaaatttaaaatgaaagtgacagctgtcataggagtgattctgttgattggaatctattactatgtgacactcccggcaatcaatattcatgcatcggaattctggatgtatcttgtggtgttggtcattctggcagctgtggtatttatcagaaagaaaaatttaaaccgttacgactggaaagagtcaaagggattaaaggtgattcttggaatccttgcggtacttgtgatcgcatatgtggcaggaacagttttgtcttctccgattgtgaatgcgaagaagtatcaggaacttttgacggtgaagaatggagaatttacgaaagatatcgaagaattatcttttgatcagattccattgcttgataaggattcagcagagcttcttggtgacaggaagatgggaagtatggtagatatggtatcccagttcgaggtagatgaactgtattcccagattaactatcaggatcagccggtgagagtttctcctttgaaatatgccagcgtgatcaaatggtttacgaacatgagagaaggaatcccggcctatatcaagattgatatggcaacacagaacacggaactcgtaaaactgagtgaagggatgaagtacacgacaagtgatcattttaacagaaacatttaccgtcatctgagatttaactatccgacctatatttttagtgatctgagttttgaaattgatgaagacggggttccgtactggatttgcccggtgaagaagtacaatatcggattattcggtggaacaacaatcggaagagttgtactttgcaatgcaatcacaggggagacgaaggattatgcagtggaggatgtcccacagtgggttgacagagtatattccgcagatctgttagttgagctttataattatcacggaacattgaaacatggtttttttaatagtgtattgggacagaaagattgtctgaatacaactgacggatacaattatcttgcaatcgatgatgatgtatgggtatatacaggtgttacttcaattaccggggatcagtcgaatgtagggtttgttctgatgaatcagagaacaatggagacaaagttctatgagatcgaaggagcaacagagcgttcggcgatgtcttccgcagaaggacaggtgcagaatctgcactatatggcaacattcccactgctcttaaatatttccggtgaaccgacctatttcattgcactgaaggatgatgccggtctggtgaagaagtatgcgatggtaaatgtacagaaatatcagatcgttgcaattggagacacggtcagtgaatgtgaggattcttacaccaatctgatgtataagaatgggatcaagacagaagctgaggatacaagatccgtagagacactgacagctaagatcacaaagatcgcccagggcgttatagatggtgattctcattattatatcatgctcgaaggttcggatgagatctttgatgtatctgttgtagatttcattgatattatccggtttaatgtcggagatgaagttacagttgagtataagaagggggagcaggtggatacagttctttccctgaatggaaaatcgagtgaacagatcagcacaaaggctgagaaagaagaacagacagaagatacggcaggagattctgcacagacagaataagagaaaagagtaaaaaaagaagtagaagaatgtaccgcccccaaaagttagaccaaaaaatctaacgattgggaggtcggtacaagctgtacttcttttttaattcttgtaaatatttaattcagacccaaatcagttgaatctttctgcatcttacttgtaatgttcttacagaactgtgcatccaagtgtgtcaacatctgcgatctcagccttatctgcgctgacgctgaggtagaagtcaatcttggcatcttcggaaatcttatttaatttctcgatgaatgtcggaagactttctaatgtgatattagcctgctttaagatactgtcgatgaaaacagcttcgatatcatgattgccagcagccataccatagaggaaacctacgaattcttctaaggtaaggatgtcaggataatcagccatcttgatgacacggatattgaaatctacagaataagtgtctttgctgctccttttaataaatacgacgttaccggaagaagtcttaaccttctcgtttgcaagatcgatcatctgctgtgtttttccgctgcctcttgggcctgtgattaaatttaccatggcgaatctctcctttatgtaagtgtgtataatgtttgagatttctcacctctcaaatatttataaattcattatacaccaaagatatgttagtaacaactaaaaaagtgttaaaatttgaaaaacttttatgcggaattaccataacttcggaaaataatgaacacttccgaaaaatgagaaaagttatcaaaaacagtattgaaaatagttctcaattatgctaacatattgtatgaatgaaaaccattctcaaaatagagctaaggagaacgatatgccgacagaagtattatcctattatctgaagaatgaagaccggaaggtgcggcttgggtttcaggttatattacagtgtgcaccttttttgaaagggcttaaagtatctggtctgatttcaatggaaaatgaattatattttgagctagaagaaatgttttccgggatggagattaattttcataagttatcttgttccaagggaaaatgccttgtcctgttctatcgtcccaaggaactggaagaatacatgaatcagtcgaaactttggaaactgatcagacaatatgggtataagaaaggcagcattgaggaaatgttgatacatctatcgacgcgagtttgtgattgtgataaacaaggaaatggatttccacatgagataggagcttttcttggatatccgatggcagatgtgcagagctttattgaaaaagatggcaaagattttattatgacaggatactggaaagtatatagtaatcctgaaaaagcgagaatgatttttcatgaatatgaccgagcaaaagattgcgcggtaaatgagtatctggatgggaaaaacatccgtgaaatcgcattgaatcaaagaaagtggaggaatttataaaatgagtatatcagttgtatattggagtggaaccggtaatacacaggcaatggcagaggcggttgtcgaaggaatcaaagcggcaggtcaggaagcagaacttctggaagtaggaaatgcagatgcaaaaatagtggcggcggtagatgcgttagcgcttggatgcccggcgatgggggccgaggtgctcgaagaatctgagatggagccatttgtagaagaattggaatctcttgtttcaggaaagaagattcttttgtttggttcttatggatggggagacggagaatggatgagagattgggcagatcgcatgaaaaatgccggagctcagttgattcgtgaagaaggaatcattgcaaacgatgccccggaagatgatgtgcttgaggaacttaaagaagcaggaaaagagctggcagagtaaacaatagtatcttattaatgaatattagtaatcttaattgaaaaaactgccggaaatatattgcatttcttataacatagtgctattcttacttctatcgtgttaaagcacgaaagagaaaaatttgttgtcatttacatctgacgtaaatgacaacaatactcaggagagtctctttaaaaagagcgccgaaggtgtaagcggtcatggatgcagttacatgccgcgagtctctcaggcaaaaggatggaggaataaagaaatgtttgcacaaatcgacaaaatcatcactgcaatcgacaatgctgtgtgggggcttccgttaatctgcctcatcatggcaacaggtatctttctaacagccagacttggtcttgtacagatcaggcatcttggcaaagctttcaaattcatgtttaaagatgaagaagacggtagcggagaagtgaccagctttggggcactttgtacagctctgtcagcaacgatcggaaccggtaatatcacaggtgttgcaacagcaatcgcacttggtggtccgggagcgttgttctggatggttatcgcggcattctttggaatggcgacaaaatacgcagaaggtcttctggcaatcaaatatcgcacaatcgacgaagacgggcatgtactcggcggaccattctattatattgaaaacggaatgggtaagaagtggacatggcttgcgaagattttcgcattcttcggagccggagttggtctctttggaatcggtacatttacacaggtgaatagtattgcatctgcagttaagaacttctttgatccggatatggcacatacagtttctttgctcggaggaaactattcatgggctactgtgatcgcaggattattcctgacagtgtgtgtaggtcttgttgttcttggaggaatccagagaattgcaaaagtatctgagattatcgtaccatttatggcagttctttatgtaggacttgcagtaatcatcattattacaaatatcacagctgttccggcagcactggcttctatcgtgaaatctgcatttacaggaagtgcacttgcgggaggagcagttggatccatgtttgtagcaatgcagaaaggtgttgcaagaggaatcttctcaaacgagtccggacttggtagtgcaccgatcgcagcagctgcagcaagaacaaaagagccggtccgtcagggacttgtgtctatgacaggaacatttattgatacaattgtaatctgtacgatgacaggactttccatcgtgatcgccggttcctggctgaacccggaacttgaaggtgtggcaatcacaatggatgctttccagaaaggacttccattcccatcgttcgtagcgacattctccctgatgctgtgtcttgtattctttgcattcacaacaattctcggatggaactattacggcgagagatgtgtggaatacctgtttaacagaaataaggctgttgtaatgggatatcgtatcctgtatatccttgcagtattcattggaccatatatgacagtaaaagcagtatggaatatcgcggatatcttcaatgcactgatggcattcccgaacttgattgcacttcttgcattgaacggagtgatcgtcaaagagacaagagatttccatgcaaaacataacggatcttattagaaaaagaattgaccgaattatctgtgaattcgaaaaataaatagaattattacctgaaataaaacgaaagaaaaggcagccaaagtccttgaataaggactgtttggctgccttttccgcaggtgtgaaaggagaatgagtagacagataattcatagacagttttggttttgtataacagatggagtaaagattatcagttaaatgaaaaactcaaaaaatgtagcagatgttctgaaaatacatgatactgtgttttggggattgcattatactatattttgtattagaataagtatcagaaagcacgatagaaacggataaaacacaagatatcgtgcaaaaataagaaaaagtgaggagactgatcaatgaaaattatcaagcgaaatgggtcggaagagacatttgatatacagaaaattgtggttgctgtgacgaaagcggataaggataatggggagcgtacgctgacagacagccagattgaagatatcgcagaatatgtggaattcaagtgtaacaagctgaatcgtgcagtatccgtagaagagattcaggatatggtagagaatcagattatggctaccggagcttttgaacttgcacgtaagtatgtaagatatcgttataagagatccctcgtacgtaaggcgaatacaacagacaatcgtattctgtcactgatcgagtacaacaacgaggatgtaaagcaggagaactcgaacaagaacccggcagtcaacagcgtacagagagattatatggcaggagaggtcagccgtgacctgacaacaagaatgcttctcccacatgatattgtggaggcagacagagaaggaatcattcacttccatgattctgactattatgcacagcatatgcataactgcgatcttgtcaatctggaggacatgcttcagaacggaactgtgatcagtggtacaatgattgaaaaaccacacagcttctctacagcatgtaatatcgcaactcagatcattgcccaggttgcaagtaaccagtatggtggacagagtatctcacttactcatttggcaccgtttgtagatgtttccagagagaagatccgtaaggaagtgatcagcgaacaggaactggtcggaatggaatatccagaagatgtgctcaatgagatcgtagagagaagactgaagaaagagatcacaaagggtgtccagacaatcgaatatcaggtgatcacactgatgacaacaaacggacaggcaccgttccttacagttttcatgtatctgaacgaagcaaagaacgagagagagaagaaagacctggcgatgattatcgaagagacacttcgtcagcgttatcagggagttaagaatgaagccggagtatgggtgacaccggcattcccgaaactgatctatgttctagaagaagataatatcgaagaaggaagcgaatattattatctgacagaacttgctgcaaagtgtactgcaaagcgtcttgttccggattacatttccgagaaaaagatgaaagagcttaaagaaggaaattgtttcccggttatgggatgcagaagctgcttaagcccatggaaagacgagaacggaaactacaagttctacggacgtttcaatcagggagttgttacgatcaaccttgttgacgttgcactttcttccggtggagatatggataagttctggaagatctttgatgacagactggaactttgctatcgcgcattgatgtgcagacacaaccgtctgaaaggaacactgtctgacgcagcaccgattctgtggcagttcggagcacttgcccgcctgaagaagggagaaccgattgataaacttctctatggaggatattcaacgatttctcttggatatgcaggactttacgagtgtgtgaaatatatgacaggaaaatcccatacagatccggatgctacaccatttgcactggatgttatgaagcacatgaacgatgcatgtaaccagtggaaagaggagacgaacgttgctttcagtatctatggttcaccgattgaaagtacaacctataagttcgcaaaatgtctgcagaagagatttggcattgttcctggaattacagataagagttatattacaaacagctatcatgtatttgtcggagaagagattgatgctttctcaaaactgaagtttgaatctcagttccaggcactttcttccggtggagcgatcagctatgtagaagttccggatatgaaagacaacattgcagctgtacttcaggtcatccgtttcatttatgacaacattatgtatgcggaactcaatacaaagagtgattactgtcaggaatgtggatatgacggagagattcagattataacagatgaggaaggaaagctcgtatgggagtgtccacattgcggaaaccgcaaccaggatacactgaatgttgcaagacgtacctgcggatatatcggaacgcagttctggaatcagggaagaacgcaggagatcaaggagagagttctgcatctgtagaattgatatccggcagaaatgctgattgttcgtaatggattaatgctgatgcggattgttgaaaagatgtagtgaaaaatcagataaagtccataagagattaaaataatgagctgtcgcgcgatagctcattatttttgtgcgtcttgcaagaaatgcgggacaggtcaataaatgtcctttggatattgacaaactctgtccttgggtattggggcttttaaagtcccaactctttcaataacttcttctgatattccctgtcggcagctgccttgagaatctcatcagttctgtttagttcggataacttcaaaatcagctgattaatcctgttttctccaagagattccccttcttttatgccttctcttatgccttcttctcttttttcatctaattcatctttcattaattctaataacgcattacacatatctcgttttccctcctttagccgattctcgtttgcttttactataatctccataacagactgatacagctgattctccttgttctttttataatcctctaaaagctgtctggtaacagacatatcttccagggtatctgtcaaactatataaccaaagatttttctccggtgacaactgatttgttacaagaacctgaatcggtaagatatctccaattacataataaatcccttcttccggattatcaatagtgtagtggcgtacttctttcaaatgtctgatcagttctcttggatatcgttttgacactaaggtgatcgtcagctcctgaatcgggatttcatttactttacctgtatctgctttataaaaatttgtatatccataaaccttatagaaatcgtccacggaaagtgaatcggatggtgatttatattcgataatattatacttgcggaatattttcccgatatttttatggatcggctctgcatttttctttttaatgatcaacacatcaattgccattggctttgaacttaatagatactcccgttcaaattttaatttttctttttcttctctgaattcaatctgtaagtctgcataaaatgcaggatgccactgaaacagctttccatctgccggctgctgtttttccggcaattgctttctcttttgtttcatctaagagacctccttatgtgattttcacagaagttctctctatcagaaaacctctgctttaaataatggattttaaaagcatgaattttctgatttggcaggtacgttctacctgtaatgaaaccttttatatgaatttagatgttttagaaaatatgctttaaaataggataacatatttatgtacaatgttcaatgcttttcgataatgagctgttgcttctgagcagcatcacttaagatagcaaaagatgaaaagatatggtatgataggagtaaatggaaagaaaattccaatcaatgctatgatacgaaatgtattttggaataagtggaaaagaggattcaaagtgaactacggagaaatcaaaaaatgtgatattgcaaatggagagggtgttcgtgttgcccttttcgtgtcaggctgcaggcatcattgtaagggatgttttaacagtatgacatgggattttaattatggaaagaaatttacggaagaaacagaagaagagattctggaagcgttgaagccgagttatattgatggattgtcattgcttggtggagagccatttgaacctgagaaccaagaggtgcttgtgaagcttttaagaaaagtgaaagagcgttatccggagaagaacatctggtgttacagtggttatttgttcgatgaggaactgaagaaagaaagcagagcgagatgcgagtatacggatgagatgctttctatgctggacgtacttgtggatggaagatttgaggaagataagaaaaatattacactgctgttcagaggatcagaaaatcagcgtttgatcgatgtgaagaaatcactggagcagggacaagtggtggaatggaaaccggcaataaaaagaggcctttaagaagaaaaagccttgacttataatcatatagtttttataatgaataggtatattgtaaaaacgcagatgaggagtagtagaaggaaaagatgcttttcagagaactgtcggttggtgtgaggcagcagcacagactttgaactgacctcggagttctttcggtgaaaagatgttatattgattagccggaggcgggagttcccgttatagaatgaatgagtgcatttgaactttgtgtcagatgaataagagtggtaccacggaattaaagccttttcgtctcttggatatatgagaagaagaggcttttctttatattgatgaaagagaggaattaagtacatgggtacaaagattgtttacaatcacaaagccattgagaaaaaatggcgtgagaaatgggaagagacaccggtcaatccaagaaatggaaaagacggaaataagaagccgaaatattactgcctggatatgttcccgtatccatcaggaaatggtcttcatgtaggacattggagaggatatgtaatctctgatgtatggagccgttataaattacagcagggatactacatcgttcatccaatgggatgggatgctttcggtcttccggctgagaactatgcgatcaagatgggcgttcacccggcaaaatcaacagaggcgaacatcacgaacatcaagagacagatcaatgatatcgcagcactgtatgactgggatatggaagtaaatacaacagatcctgagttctacaagtggacacagtggatctttgttaagatgttcaaggaaggtcttgcttacgagaaagaattcccgatcaactggtgtccgtcctgtaagacaggtcttgcgaacgaagaggttgtgaatggtaaatgtgagcgttgtggtgcagaggttacaaagaagaaccttcgtcagtggatgcttcgcattacaaaatacgcagatcgtcttttaaatgatcttgataaacttgactggccggagaaggttaagaagatgcaggctgactggatcggaaaatcttacggtgcagaagttgacttcccggtagaaggaagagatgagaagatcactgtttatacaacaagaccggatacactccacggagctacatttatggtacttgctcctgagcacgaactggcagcatctctcgcaacagatgagacaagagaagcagtagagaaatacatttatgatgcatctatgaagtccaatgttgaccgtatgcaggacaaagagaagacaggagtcttcacaggaagctatgcgatcaacccactgaatggagcaaagacaccaatctggctgtctgattatgtactggctgactacggtacaggagcaatcatgtgtgtacctgcacatgacgaccgtgacttcgagttcgcaacaaaattcaatattccgatcattcaggttatcgcaaaagacggagaagagattgagaatatgactgaggcatatacagatgcagtcggaaccatgatcaactccggtgagtggaatggtatggagtcttctgtgcttaagaaagaagctccacatatgatcgaaaagatgggaatcggacgcgcaacagtaaactacaagctgcgtgactgggtattctcccgtcagcgttactggggagagccaatcccgatcattcactgtccgaagtgtggaaatgttccggtaccggaagaagaacttccacttcgtctgccagaggtagattcctacgagccaacaggaacaggtgagtcaccacttgctgcaatcgatgagtgggtaaactgcaagtgcccggtttgtggaagtgattccaagagagagacaaacacaatgccacagtgggcaggatcctcctggtatttcctgcgttatgtagataatcataattcagaagcactcgtttccagggaaaaagcagacgagatgcttccggtagatatgtacatcggtggtgtagaacatgctgtacttcaccttctgtactccagattctatacaaaattcctgtgcgatatcggagcaattgactttgatgagccgttccgcaaactgtttaatcagggaatgatcacaggtaagaacggaattaagatgagtaagtctaaaggaaatgttgtatcaccggatgatctcgtacgtgattacggatgcgactccctgagaatgtatgagctcttcgtaggaccaccggaacttgatgcagagtgggatgaccgtggaattgacggtgtaaaccgtttcctgaaacgtctctggaatatccttatggatagcaaagagaaggatattcagcctacaaaagagatgatcaaacttcgtcacagaatggtatatgacatcacaacaagacttgaaagcttcagcctgaatacagttatttccggattcatggagtacaataataagttcatggaaattgcaaagaaagagggcggaatcgacaaagagacactcgagacaatagcagtacttctttctccattcgcaccacactttgcagaagagatgtgggagcagcttggacatgaagagacaatcttcaatgcaggatggccgaaatatgacgagaacgagatgaaagatgatgagatcaagattccggttcagatcaacggtaagacaaaagctgtaatcgagatcccggctgacatctccaaagatgatgcaatcgcagcaggtaaagaggcaatcgctgataagctgacaggaaatgtgatcaaggagatttatgttccgaagaagattattaacattgtaatgaaataattaaaaaacgagaaatggcgcagatggtagagatattgtctgcgttatttttgttgtttaagtttatgatttcatagttcttaacataatattgatacgtaaaaacacgttgacacacgtatttttacgtagtaaaatataaatatgataagacagtaattgttccttatcactccaaggacttgaaaaaaggattggagcaggcaatacttaaacaggcagggcttagatagtcctgtcgcttgaaagagaggttatttgatgaagaatagattattttatccagctgtttttcataaagcagaagaaggcggtttctgggttagctttccagattttcctgaatgcatgacacagggcgatagcatggatgaagcatatgaaatggcgatagatgcattaggtttgtcattgtccagtatagaagatgaaggaactgatatcccaaaagcatcagaatttgaaacggtggatcctgaagatgggattttggtaattatagaatttgatatggcagagtatcggagaaagcacagatcaaaggctgtaaaaaagacgctcagtattccagaatggttaaatgaagcggctattcgagagaatcttaatttctctcagattcttcaagaagcgcttatgatgaaattaggagtaaatggaagacagcggtaatatgtctaaaaattgttcctaagccctttgtgtattatcaaatctttggatgttccacaagatcaaatgcagagttatgaatcagataatcataagcagctgcaatctcttccggggtatatgtgatatcatgcatgattgcatattttacagaatctgcgagcccaaaggtataaaatcgcgcaattgtctcgcgactgagtatctggagcttcgcaggtgatttcaatggatatttgtttaataatctaagcaatgtatcataaataaattggaacatcagatgatcgaaggagttaggaccttcgatcaaataaagtctcttataaaattctttgtctttagaaagacaggtgaaaagaagacggagaagatcgtcttccatgtcattttcaatcagtacccggattttatctttgatttccttttcgaggatatattcgagaatttcatatttgtcctgaaaatgtctataaaaagtcggacggattacatccgctccgtcggtaatcatcttaactgtaatcttttcaaaaggcatcttcataataagttccttgaaagagagtgtcagcaggtcttttgtcagttcttttttctcttctgtcatttgttcaaatcctttctacaatggaaatattataccataaaaaagagaatgtgattaaaaaagtttctaagattgacagttctttaacatgacttttcaagaacatagtgttgagatttcttgatatttcggatacatttcacatgatttgtagccgaaaaagaacaacagaaagaaaatgttcaaaccacaacacattcaaaaaaatctgaatcttacatgaaaaaaaggaaaatgctaaagtatggaataatagcttatacttaagaaaggttccttgaaaagtaaggaaaaggtgaaaaaaatggcaggattaaaatttcaggcagaaagagcagcatttggtttggcagcagataaagtacttaaatatatgaacaagacagatgatagaacgaaagcacttcttaagcttgtagatcttacagaaaattttgcaaaagatcgtttccagccagggtcttatgaagctgcaagaaagatgattcaggatccggacaacaaatgggttcagtatctgaacagactttttgatgaagtagatccgcatgtccttaagacaacagcattaaatcttggatttgacgcaatgctttatggaacaaagttaatgcacgagtcacgtgaaaaatatcagtgtaacattccatggctgatcctgatggacccaaccagcgcatgtaatctgaaatgtaccggatgctgggcagcagagtacggacatcttttgaatctttcttttgaagatatggatcgtgtgatcacacagggaaaagaacttggaatttatctttatatgctgacaggcggagagcctctcgtgagaaagaaagatgtcatccgtttgtgcgagaaacacaacgactgcgtattccacgcatttacaaacggaacacttgtagatgatgagttctgccaggagatgcagcgtgttggtaatctgtccttgtccatcagtctggaaggatacgaggaagtcaacgacggacgccgtggaaaaggcgtttatcagaaagttatgcatgcaatggatcttttgaaaacatacggcttgattttcggaacatcaatctgctatacacgcgctaacattgaaactgtaacatccgacaaattccttgatatgatcattgaaaaaggatgtcgctatgcatggtatttccactatatgccggttggaaatgatgcggcactggatctgcttccaacaaaagagcagagagaatacatgtatcaccgcatccgtgaaatccgtggattgacaggcggaaaacagctctttgcattcgatttccagaatgatggggagtttgtaggaggatgcattgccggaggaagaaattacttccacattaatgcaaatggagatgcagagccatgtgtatttatccattactcaagtgcaaacatcaaagaagtgagcgtgcttgatgcactgcgccagccactgtttatggcttatcataacaatcagccatttaacaacaatcatctgcgtccgtgtccaatgctcgaaaacccggaaaaactgcagcagatggtacacgaaaccggcgcaaaatcaacagacctacaatccccggaaagcgtagaacatctctgcggaaaatgcgaacattacgccaaagagtggaaaacaaaagcagacgaactttgggaaaaaaaataatttcggaaacataatcgtagtcgataacgtttctttttcactttacgttttgatggtcgtatttgttttctggattcactctgattggaacagaaatttttattttgagttatgtgagcaaggacagtactactgttgccataggcacatgtaaggcaggagcgttccgaatacactttgttcagtatgttaataaaagccaaaacaggcaccacacacggtaactgttttggcttttatgttacatactgaacaaagggatgaggtagagcgggccggtgcctacggtaatagtagtactgtccttgcgtatcattctaaagaaagtatttgatctaattgcttgaatccaagttcaacaaatccactttacttcttctgtgattctacttcctgcattttcatagcacgaactttcagaggaagtccgaacaggttgatgaatccgtcagcgtcatgatgatcatacagatctcctgttgtgaagcttgcaagggattcgctgtacagtgagtatggagatgtctctccggcacggatgatatttcctttatagagacggaacttaacttctcctgttacatactgctgtgtaacatcaacaaatgcctggattgcttcacgaagtggtgtataccattttccttcgtatacgatctgagcaaatttatttccaagatctttcttaacttcatatgtagcacgatcgagaacgagctcttcaagctggtcatgtgcttccataaggattgttccaccaggagtctcgtaaacaccacgtgatttcattccaacaacacggttctcaacgatatcaacgattccgattccatgttttcctccgagacggttcagttctgtgatgatttcagaaactttcatctcttttccgtttacgctctttggaacacctgcttcaaatgtcattgtaacgtattcatctttgtctggtgctttctctggtgttgtgctcagcacgagaagatcatcgtagtttggctcatttgccggattctcaagttcaagtccttcatggctgatgtgccacaggttacggtcacggctgtagctgtgctttgcgtcaaatggaagatcaattccatgagctttacaataatcgatctcgtcttcacgggactgcattgtccatacatctgtcatacgccatggagcgatgatcttgatgtccggagcaagagctttgataccaagctcgaaacggatctggtcatttccttttcctgttgcaccgtgacagattgcaacagcgccttctttacgtgcaatctcaaccagttttttagcgattgccggacgagccatggaagttccgagaaggtatttgttctcataaacagctccggcctttacacaaggaacgatgaagtcatcacagaattcatcaatgatattttcaatatataatttagaagctccggaaagttttgctctttcatccaggccatccagttcttctccctgtccacaatcgatgcaacagcagataacgtcatagttaaatgtttctttcagccacgggatgattgctgtagtatcaagaccacctgaatatgctaatacaactttttctttactcattttattgcctcctaaatgtatttttataaatttctgtttcctcagtttcttgagttctaaagtttgccgctttaataagctaaaacctactatacaccacattttataattatgcaagtattattttgaaaaaatgaataaaatgcataaaattacatataatgtacaaaaaatgaataaaacgaagaaaaaatgagtgaaaatatgcaagatgtgacggagaagatgtgaaactagaaaaacaaaaaagttaggtactgttattttgaattgtgatatatttgacgaatatgttaaaaatatatcgtgaaaagctgttgattttagtaaatgtgtctgataatataaagatatcaaagaaactgacctaaaaaatatttagatagtcagacgaaaacggatcacaacctatctgtttaatataaaagtcagaagggcatgtgagcaagaaagagagggaaaacaaatgggatttcttacaggaaagacagcaatcattacgggaggaggacgtgcagtactaagtgatggcagctgtggatccatcggatatggtattgcaacagcttatgccaaagaaggtgcgaatcttgttcttacaggaagaaatgtaaagaagctggaagacgcgaaagaagagttggaacgtctctatggagtgaaagtgcttgcagtacaggcagatgtcaatgcgggagcagataacaaggcagcagttgagcacgttgtaaagcaggcagttgaggaattcggaagaattgatgttcttattaataatgcacaggcttctgcatcaggagtaactcttgcagatcatacaacagagcagtttgatcttgcgatttattcaggactttatgcaacattttattatatgcaggcatgttatccatatttgaaggaaacacagggatccgtaatcaactttgcatcaggagcaggccttttcggtaattacggacagtgtgcgtatgcagcagcgaaggaaggtgtcagaggactgacaagagtagcagctacagaatggggagtagacggaatcaatgtgaatattgtgtgcccgcttgcatggacagcacagcttgaaaacttccagaaagcatatccggatgcatttaaggcgaatgtaaagatgccgccggcaggacattacggagatgtagagaaagagattggaagagcgtgtgtacagcttgcatcaccggatttcaaatatatgaacggcgagacaattacattagaaggcggaatgggacttagaccttaatccttctttggaaaataagaatgatattttctatatagaagatagataaatagaagaaaagtagatcggcgatgatagacgtaggaatagttacgtttatcatcgctgttttatgtagcaaaaaactttttgaaaaaaatacttgcatattatacatgaaagatgtattattatgcacatgaaaatgaataacgtgtatttttatacattcattttaagaaaagctttacatcccgattaaagtggtatattataaggagaaatgattgcggtaatacgttaccgtggtacagcaaacaagtaattctcgggagtatttcgagggaatgagaaaagaaaggacttgagaatgatgattaaggtcggaattattggagcaaccggttatgcaggcggcgagctcgtaagaatattgatgggacataaagatgcagagattgtctggtacggatccagaagttatgtagatcagaaatatgcagatgtatatagaaacatgtttcagattgtagatgcaaaatgcatggatgataacatggatgagcttgccgaacagatagatgtgatcttcacagcaaccccgcagggactgtgtgcatctctgatcaatgaagaaatcctttcaaagacaaagatcattgatctcagtgcagatttccgtctgaaagatgtgaaggtttacgaagagtggtataaaatcgaacacaaagcaccgcagtatattgatgaagctgtctatggattgtgcgagatcaaccgagacaaagtgaaggatgcacgtatcgtggccaatccgggatgttatacaacatgttctatcctgacagcatatccgcttgcaaaggaaggactgatcgatatgagcactctgatcatcgatgcgaagtctggaacatcaggtgcaggaagaggagcaaagcttccgaatctttactgtgaagtgaatgaaaatattaaggcatatggagttgcaacacaccgccatacacctgaaattgaagaacagcttggatacgcagcaggagagaaagttgtgttgaacttcacaccgcatttagttccgatgaatcgaggaattcttgctacagagtacgcaaagcttacgaaaaaagttacatatgaagaagtaaaagcaatttatgataaatattatgcagatgagaaatttgttcgtgttctggagaaagatcagtgtccggagaccaaatgggtagaaggaagcaactacgtagacattggatttaagatcgatgagagaacaggacgaatcattatgatgggagccattgacaaccttgtaaaaggtgccgcaggacaggcggttcagaatatgaatctgctgtttggtcttccggagagtgaaggacttgaactcgttccgatgttcccataggttatattgataaaggtggtatgtatgatacgtgtaatgacaatagaggattatgatgaagtatataaattatggaagaagatccggggattcggaatccgcagtatcgatgattcaaaagaaggtgtcgaaaggtttctgcgacggaatccgacaacgagttttgtcgcagtgaaagaaggaaaaatcgtcggaagtattctctgtggtcatgatggaagacagggaagtctctatcatgtatgtgtggatgaggcataccgaagacatggaatcggaaaagacatggtcgtgcatacaatgaaagcactccaggcagagaagatcaataaggtttgtctgatcgcatttgcacagaataatgtaggaaatgcattttggaatacaatcggatggacggaacgacttgatgtgaattattatgattttattttaaatgaagaaaatattacagcattcaatgaacaataagcagaaaggaagcaagttatatgaagataatcgaaggcggagttaccgcagcaaaaggatttgaagcagcagcaacagcagcaggaatcaaataccagggacgtacagatatggcgatcatttacagtgagaaaccgtgtaaagtcgccggaacatttacaacgaatgtagtaaaggcagctccggtgaagtgggacagacagattgtagagagcaaacagaaatcacaggcagttattgtaaactctggaattgcaaatgcgtgtaccggagaggaaggtatgaaatactgtgaagagacagcaaaagaggcaggaaaagttcttggaatcgatgagaaaggtgttcttgtaggttctacaggagttatcggaatgcagattccaatcgataagatcaaagccggaattacagaacttgccaaggaaaagaaagctgatctggcaagtggaacagaagctgcgaaagcaatcatgacaactgatacgaagaaaaaagaagttgcggttacatttatggcaggagatacagaagtgacgatcggaggaatggcgaaaggttccggaatgattcatccgaacatgtgtacaatgcttgcatttattacaacggatgcaaaaatttccaaaaaagcacttcaggcggcaatgagcagtgatgttgaggatacttataacatgatctctgttgacggagatacttcaacaaatgatacagcactccttctcgcaaatggaatggccggaaatgagaagatcaaagaaggcacaccggcattcgacgcattcaaagaggcgcttcattatgtaaacgagacacttgcgaaggcaatggcgggagacggagaaggtgcaacagcactttttgaagtaaaggttgtcggagcacagacaaaagagcaggcaaaggttcttgcaaaatctgttgtatgctcgaatcttacaaaggctgcgatcgcaggacatgatgcgaactggggaagaatcctttgtgcaatgggatattccggagcaaagtttgatccggagcaggtagatctgttcttcgagagcagtgcaggaaagcttcagatcattgctaatggaacagcgacagattatagcgaagaaaaggcaacagagatcctttcacaggaaaaagtgacagcgattgctgacttgaaagccggagatgcagaagctactgcgtggggctgtgacctgacacatggatacattgatatcaatgcggattacagaagttaacctatagagaaattattgtttctttaaagacgctgaaaaaatagaaaatacagaaaaagggagacagaaaaaatgacaagcaatatgcagaaatatctggataaagcgcaggtgctgatcgaggcacttccttatatccagcgctttaaccgtaaaatcatcgtagtaaaatatggcggaagtgccatggtagatgaaagcctgaaacgcagagtgatcgaggatgttacacttctgaaactgtgtggattcaaaccgatcatcgtgcatggcggtggtaaggaaatcagcaagtgggttggaaaagtcggaaaggaagcagagtttatcaacggacttcgtgtgacagatgcagagacaatggagattgcggagatggttctgggacgcgtgaataagagtcttgtacagcttgtagagagtcttggcgtgcgtgcgatcggaatcagtggaaaggatggaaatctactccaggttgagaagaagctttcagacggacaggatatcggattcgtaggagatgtcaaaaaagtaaatgcagagattttgtatgaccttttggaaaaagatttccttccgattatttgcccggttggtatggatgaggaatacaatacttataatatcaacgcagatgatgcagcctgtgcgattgctcgtgccatgaaggttgagaagcttgcgttcctgacagatattgaaggagtttataaagatccgaaagatccatctacattgatttctgaattggagatcaaagaagccaaggaattgatcacagacggatatattggaggtggaatgcttccaaagcttcagaattgtattgatgcgattgaaaatggtgtgtcacgtgtacatattctggatggaagaatcccacattgtctgttgcttgaaatctttacaaacaaaggaatcggtacagcaattttaaatcagaaagaaagcaggtattatgatggtgaacagtaaaatacaggcggcagaagagaacctgatccatgtatacaatcgattcccgattgcactggatcacggagaaggaatgtatctgtatgatacagaaggaaaagaatatcttgactttgcagcaggatttgctgtgtcaggacttggatatgataataaagaactgaatcaggcattaaaagaccaaattgacaagttataccatacatcaaatctttattttcacgagagctgtggagaggcagcaaaagaactgaatcgcatttccggaatggacagagttttctttacaaacagtggtggtgaggcaaacgaaggtgccttgaaagcagccagaagatatgcttacacaaagaagacaggaagatatgaatttatagcaatgcagaattcttttcatggaagaagcttcggagcagtttctgtgacaggacatgattcttatcgagaaccgtttgagccggttgttccaggtgtgagatttgcagagtttaatgatcttgacagtgtgaaagcactggtaaatgataagacttgtgcaattattttggaaccgctgcagggcgaagggggaatcaatcttgcaacacaggaatttatggaaggaatccgtaaaatctgtgatgaaaatggaatcctgatgatctgtgatgaagtgcagtgtggaatgggaagaaccggaaatatgtttgcatggcagggatttggtgtaaaaccggatattctgactatggcgaaagcaatcggaaacggaattccggtcggtgcatttgcaatgacagaagaagtggcaaaatattctctgcagccgggagatcacggcgcaacatacggtggaaacccattagcatgtactgcagtcaagaaagtaatcgagatctttgaacgtgagaatattgtggggcatgtgaatcaggttgctccatatctgacaaaaaaactggatgagcttgtggatgagctggactgtgttgtcaaaagaaaaggaaaaggtctgatgcagggaatcgagattacaaaacctcttgcagaagtaaataaaaagacaatcgaagaagggcttttgatcattcaggcgcaaggaaatgtcatccgttttgttccaccgctgattgtagaagaaaagcatatcgatgagatgatcgaaaaactgaaacgtgcacttgtataagagatcttatacataaaaaagccggcatttgcttatactatttctatagggaggtatgagcttatggccggttttttgattgcactgctatcaggtgcgctgatgagtgtacagggagtgttcaacacgcaggtgacaaagacgacaggagtctgggtaagcaatgggtgggtacagctttcagcatttcttttgtgtctgtttgtctggctggcaacaggaagagactctgttacagcacttatggaagtccagccgcgttatatgttgctgggaggtgtgatcggagcaggaatcacatggactgtgattaaaagtgtggatgctctgggacctgcaaggtcagcacttttcattgttgtttcccagctggcggttgcttatctgatctcattatccggaatgttcggaatggaaaaagaaccattttcatggagaaaactgattggattgctgatcgcagccggtggaattgttcttttccaatgggaatagacagttttacgggtattgtaacaagtctgtaacaaagcgttaaattgtctattgtatttttgagaaaaattcgttacaatatttatgtccggttttaaggggaagtctgactgtctgagaacagtgaggcaataggatgaagaacggatggaagaaaatatgcagatgccgtaaagggcagatgctaaaaggaattgtattgactttaactttggcttttttgaccatgggattgtgtggctgtgcagagaagcaagacgcagcggaagaacttgaagagttcacactggagggggaatctgatgtagagaagaattcctcaaattccaaaacagagtcagaaaaaggatctcagggtggcacagatgcagaagaaggactgccggagacgttatatgttcatgtatgtggagctgtgaatgctccgggggtgtacgaactgaggacagatgcacggatttacgaagcattggaagcggccggtggaatgacagaagatgctgctgcagattggatcaatcaggcagaagctttgagtgatggagagcgaatctatgtgccaacgcaggaagaagcagaggagtcagcacaatctgtttccggtcagtgggcagatccgaatggaaatgcaggtggatcagtcagtgataaaattaatataaatacagccacaaaagaagaattaatgaccttgagtggaatcggagcatcaaaggcagagagtattctgaagtacaggcaggagcatggaaactttcagagtatagaggatctcaagaagatcgagggaatcaaggatggcgtatttaataagataaaagacgatattacggtataggagcaggcagaagaacggccagaaagaggagtatgagcaagaagatattagttgttgatgatgaaaaattaatcgtaaaggggatccggttcagtttggaacaggaaggaatggaagtggattgcgcttatgatggagaagaagcattagaatatgcgagaagatgtgagtatgatcttgtacttcttgatgtcatgcttccgaaactggatggtttccaggtatgtcagcagattcgtgaattttcagatatgccgattgttatgttgactgccaagagtgaggatatggataagatccttggtctggaatatggtgcggatgattatatcacaaagccgttcaatattcttgaagtgaaggcaagaatcaaggcaatcatgcgcagaacagcgaaacgcaaggaagagccggccggcagtccggtgcttgtgaaagggaatatgaagattgattgcgaaggacgccgtgttttcatcggggaacgtgagatcaatcttacagcgaaggaatttgatgtgcttgagcttctggcgatgaatccgaataaggtttacagcagagagaatctgctgaatctgatctggggatatgattatccgggtgatgcaagaactgtagatgtacatatccgtcgtttacgagagaagatagaacagaatccaagtgaaccaaaatacgtacatacgaagtggggagtgggttattatttccaggggtaagaatacattttcatttaagaaaaagatctttaacaatcttagattccgaatttttattatagtgcttcttgccgggcttgtgcccagcgtagtagcactatttggaatcgtaaaagtctatgagtcacgtgctgtgtcacttcgaacagcagaaattcagaatcaatgtacaattttaacgaatcagatcagtgcgagccactattttgaggacacttcacaagaggtggtcaatgacagtctgaatcagctgactaacatttataacggaagagttatggtaattgatgatcagctgagggtagtcaaggatacttacagtctggatgagggaaagctggatgtatctgaaagtgtagtgcgctgtatgaaggggacgagcacgaataattatgataagaagaatcattatatcgaggtgactgcaccgattgcaatacccggagaggatcagattcgcggtgtaatgctggcaagtgtttcaactgatagtattgaggattctctggatgtattatatacacaggggagcgtgattattggtcttgtgatgatttttctgacgattgttgcagtgtttgcagcagattgtgtagtacgtccgctgcatcagattgcagctacgatcgagaatgtaagtgcagggtatagcgacgatgttttgcatgtggatacatttacagaaacgaaaagtatcagcgaagcaattaataagatgatgggaaggctgaagcttttggatgattccagggaagaatttgtatccaatgtatctcacgaactgaagaccccgatgacatcgatgaaagtactggccgattcacttctggagcaggagaaccttccggttgagatgtatcaggaattcatgggtgatattgcaaaagagattgaccgtgagaataagattattacagatcttttgtcacttgtgaagatggacaagaagggtcagacgctgaatattgaatccgttaatattaatgaacttctggaacagattttgaagagattaaaaccaattgcagagaaaaagaatgtggagatcgtaatggagagctttcgtccggttacggcggagattgatgagacaaagctgtcacttgcgatttccaatctggtagaaaatgcagtaaagtataatcatgataatggatgggttcatgtatcattgaatgcagaccacaaatttttctatgtaaaagtagaagattcaggaattggaattccgaaagaggatcaggcgcatgtttttgaacgtttcttccgtgtggataaatctcattccagagagatcggaggaacaggacttggacttgcaattgcgcgaaatgctgtgattgcacatagaggtgcgattaaagtatatagtgaagaaggcgaaggaacaacatttactgtgagaattccactgatctatacagcttcttaggagaaaagttatgaaaaaaagaaaaggaatcgcagtgttgcttattctgattctttctctcgcagtaactgcgtgtggggatcgttatggagtaaaggaaggcgaatcttacatttactgtatgaatacagacaagacaggacttgtaaaggttgcagctaagatcagcggcaattctgcgataaaaaaggcggaatctgtaatcgatgagatgaagaaaccaacgaatgaaattgaatatacccaggcaattccggaacaggtgaaattgctcgactgtgctttaaagggcagtatccttgagattaatttcagcgaagaatattatgaagtgaaatccttagatgagaaactgatgcgggcagcaattgtgcagtcactgcttcagattgatggaattgatgcagtatctgtccgtgtggaaggggaaccgctcaaagataatgagggaaatgatgttggcttaatgaatgaggatgacattgttgatgcaacaggatcctcgttaagttcttatcaaacggatacactgacattgtattttgcagatcagaatggatccaaactggtcaagcaagaggttgatgttcattacagcagtaatgtcttgaaagaaaagctgattgtagaaaagctgatgcaaggtccatctgaggagggggcatatccaacgatcaatccggcggctaatctgttgagtgtaacgacaaaggatggaatctgttatgtgaattttgacagcacatttctgatcagtgcgtatgatgtactgcctgagatcacgatttattctattgtggattctcttgtagagggagcaggagtaaggcaggtacagattacgatcaatggtgaatcgaatgcaaaatacatggagaaggtggacttgtcacagccattgaatgaagagcaggactggatagcagcagataacaaagaatgagaaaacgcccgctctgtatggtatgtcttatactgcttgccatacagcttgtaagagtgagttttttacagaatacaaaagatcagaaaccgtcccttgcagaaacattgatttcagatgagaaagatgtgatttgcgagggcacggtttataaaattgaaaataaatcacaatcaactgcaatttatctgaaagatgcggttgtttcttgtacagatcaaaagagtaagaatcagataatcaaagaaaagaaaatccttgtaacaataaaaaataataaatccggtaaaaaaaacagaatgaaaataggacagaagctgaatgtgtgggggacaaaacagtcgtttcatccgccaaggaatccgggtaattttaaccaaaaaagttattatcaaaaacagggaatccatgttggggttttaacaaaggcagaacaggttgagatagttttgtctgaaaaagacaagaactggattgtatcacgatggaatagcatacggaatcagctagaccggctgaaaaattactggaactggaagattgtaagccagatgggaaaaacacatggcgcgatgctttctgcaatcttgttgggagaaaaaagcggacttgatccggagatgaaaaaattgtatcagaagaacggattaggacatctgcttgcaatttcgggattacacatgtcactgatcggaatgtctgtttaccggttattaagaagaataggaaattcatttctgttttccggaattgccggaggagggattctgtttttctatctggttatgacagggccacaggtatccagtcttcgtgcacttcttatgttttttatccgcatgggggcagaaattaccgggagagatgtggatcagccaacaagtctggcggttacagcagctatcttaagcatatatcaaccgttgtatctgctagatgcggcatttttactttcatttggtgcaatccttgggattttattattgtatccaatttttgaacaaaaaacacatttgaaagcatgggaaggatttaagattagtttagctgttaatggaatgcttctgggaatcatgctgtattattattttgaggtgccgccgtatgcactcgttttgaatgttattttaattccgttgtttccatttgtgatgttgacaggtataggtggaattttattttcagaattatcgggaaccataggaaaaattggattcagaagctgtgatcgcctgttgtccttctatgataaattatgtgagctgacatcagcgcttccgggcagcaggattgtgaccggacagccagagttatggtgggtgcttatttactatggtgtgctgttgtttttgtgcttcctgtttcatgcaatgaaaaataagacagataaccgaagaaaacaggcgggattttcacttcttgtttgtattgtcatagcaggatcgatctgcggatgcggaatactcaataatgattcaaaaaaccttcaggtgactgttctggatgttggacagggggactgtatttttataagagacagggaaggaaagaaaatgctggtggatggagggagcagtgatctgtcttctgtcggtacttaccggatagagccgtttctattatcgcaggggatcagaaaactggagtatgtttttgtgacacatggtgatgcggatcacatcaatggaattcaagaacttctgcaaaatcagaaacagggagtggaaatcgatgcgcttgttctgccgccggaagaatatatggatgagaaattactccatcttgcagaaatagcgaaagaaaacgggacgagagtgttgacaatttatgccggagaaaaagtaggaacgtatttaaaatgcatcgctccgttgacaacgaggaaaaacgagcgtattcgtggcaaggaagaggagatgcctcgtctggaagcgggaaatgaagcatctgttgtacttgaattgaaggatggggcgtttcaaatgcttctgacaggagatctggaaggaagaggagaggaacagctggtggaaagcggaacgttggaaagctgtccaatcttaaaagcaggacatcatgggtcgaagaattcagggagtgaagacttccttcagattgtgaaacccagattaacattgatctcagcggggatagagaaccgctatggacatccacatgcggagacgctggaacgcctgaggggaatcggaagtgaggtattatccacgcaggaatgtggcgcaattacactaaagagtgatggacgaaaaataaaggttcacaagtatttataaaattagttgctagtcgcacatcgtgtgaacagtaacaaaattatggcaataggaacaggtgataaaaaggctcttgtcaaagtgttggttattcatttataatagaatagttatgaagaccttaaatgaagatttaaaatcaggacaatttaagcaggtatatcttctctgtggagaagaaggatatctgaagaaacagtataagaaccgttttgtgaaggcaatgcttccggaaggtgatacgatgaactattcgtattatgaagggaagaatacgccagtgaaagaagcaatcgatcttgcagagaccttacctttctttgcagagcgcagactgatcgtatttgagaatacgggattttttaaaactgcggcaggggcagatctggcggattatatcaaggatatgccggagacaacctgttttatctttgtggaagaagagattgataagagaaataagctctataaagcagtgaaatcaaaaggatatattgcagagctgtccacgcaggatgcaggaactttgaaacgctgggttgcaggtctagtccgaaaagagcagaagcagatttcggagtctgtgattgtgtattttctcgataaagttggaacagacatggaaaatatccagggagagctggagaaagtattctgttatgcactggagagagatacgatcacgaaggaagatattgatgccgtctgtgtgacgcagatcacgaatcatatttttgagatggtagatgcagttgcagccggaaatcagcagaaagcactggatctgtattatgaactgctggctttaaaagaaccgccgatgcgtattctttttctgctggtacgtcagtacaggatgcttttccatgtcaaggcacttgcaaaccagggatatggaagaaaagagattgcgtctaaagcaggattacatccatttgtggcaggaaagaatatggaacaggcgaagcggtttaagatgggacagctgcgccgtgtgatggaagaaggggcacagctggagcaggatgtaaagacaggattgctgacagacaatcttgcggtagaactttttattgtaaaacagtcagaaagatagatggaggaagaagtattgtcaacaattgatcagagtcatattagaaatttttgcattatagcacatatcgatcacggtaagtctacactggcggatcgtatcattgagcagacaggacttttgactagcagagaaatgcagtcacaggttctcgataacatggatctggagagagagcgtggaatcacgatcaaagcacaggcagtccgtactgtatatcaggcagatgacggagaagagtatattttcaacttgatcgatacacctggacacgtcgatttcaactatgaggtatcccgaagcctggcagcctgcgacggagcgattcttgttgttgatgcggcacagggagttgaggcacagacacttgcgaatgtatatcttgcactggatcatgatttggatgttatgccggttatcaacaagattgatctaccaagcgcagagccggagcgtgtaaaagaagagatagaagatgtgatcggaatcgatgcggagaatgcaccactgatttctgctaagacaggactgaatgtacatgaagttctcgagcagatcgtacagcagattccgtcaccggtcggagatccggatgcaccgcttcaggcactgatctttgattccaagtacgattcttacaagggagttattgtattctgccgtatcaaggaaggtacggtcaaaaaaggtacaccgatgcttatgatggcaacgggtgcgaaagcagaagttgtagaagttggaacttttggagcgggacagttcattccatgtgacgcactcgaagcgggaatggtaggatatatcacagccagccttaagaatgtaaaggatacccgtgtcggagatacgatcacgaatgcagagaatccttgtgcagaaccacttccgggatataagaaagtaaatccgatggtatattgcggactctatccggcagacggagcaaagtatccggacttgagagatgcacttgagaagttgcagcttaatgatgcggcgcttcagtttgaggcagagacatcggtagcacttggattcggattccgttgtggattcttaggactccttcatctggagatcattcaggaacgtctggaaagagagtacaaccttgatcttgttacaacagcaccgagtgttatttacaagatccataagacaaacggtgatgtgatcgatctgacaaacccgacaaacatgccggatcctgcagagattgaatatatggaagagcctatggtaaaggctgagatcatggtaacatccgagtacatcggagcaatcatggatctgtgtcaggaacgccgtggaatctatcagggaatggaatatatcgaagagacaagagccgtgttgacatatcatctgccactcaatgagattatttacgatttctttgatgcattgaaatcaagatccagaggatacgcatcttttgattatgagatgcttggttatgtacgttccgagcttgtcaaacttgacattctgatcaataaagaagaagtggatgctctttcctttattgtattcgagggaagtgcttatgaacgtggaagaaagatgtgtgagaagctgaaagaagagattccgagacagcttttcgagattccgatccaggcagcagtcggaagtaagatcattgcgagagagacagttaaggcaatgcgtaaggatgttcttgcgaaatgttacggcggtgacatttcacgtaagaagaaactgcttgaaaagcagaaagaaggaaagaagagaatgcgtcaggttggaaacgtagagattccacagagtgcattcatgagtgtcctgaagctggatgagaactagataaaagaaggaaggggaagatactgtttttgtcagacagtatctttctgtatttaaagatgaaaaagagaaatttagaattatatctccatattccattttgcgtaaaaaaatgtaattattgtgattttttctcagcaagtggaacaccgaaagaacaggcggattatgtcagtgctatgattcaggagattcagagttatcaagaattgtctggagagtatgaagttcagacaattttcctgggaggaggaacaccgtctctgctgactccggaacagatagaacaaatttttgatgcgatttatcatatattttcagtaaatgagaatgcagagatcacaatggaaatgaatccgggaatcgttgatattgaaaagctttgtgctatgaaagcagcaggcgtaaacagactgagtatcggacttcagtctgcacagaacgaagaactgaagatgcttggaaggattcatacctatgaggaattccttgagacatggagactgacagaacaggcaggtttcaaaaacagaaatatcgatcttatgtctgcgcttccgggacagacgatggaaagctatgaagatacactttcaaaagttctggcacttgagccggaacatatatccgcatatagtttgatattggaagaaggaacagtattctacgactggtatgaaaaagggaaattagaccgcggtgcatggaaacttccgtcagaggaagaagagtatgcgatgggagaattgacaatacaaagacttgcagaagcaggaatgcatcgatatgagatatccaattatgcaaagtcgggaaaagaatgcaggcataatctcggctactgggacagagtggagtaccttgggattggggcaggttcctcatcgctgatcaaaggggaacggtttgaccatatccgtgatcggaaagcatatattgaaaagattagaaatggcgagccgattcttattgacagagaaattctttccgtggaatcgcagatggaagagttcatgtatctgggacttcgcaaaatagagggagtttcgagaacagatttccagaattattttggaaagaatgtggatgatgtctatggggaaattcttgataaattagaagaagaacaattgctggaatttagtgggaatcgaatccgactgacgcatcgggggatggatgtcagcaactgtgtgctggcggagttcttattttaaaggcaaaaaactaaaattgtgcaaattccaccaaaaacagtcatgaattttgttgattagtttgattgactatgaacgaatttgaacgtataatacaaacataaagaaaaacaagcagtcataaatgaaagcagcttatcgagactgaccgagtttgactgaataaagcttacaaataaactgtggcagcagtttgaagtgactggagtgagagaaggaggagtaaaatgatttacacagtaacatttaatccgtcattggattacattgtctctgttgaggactttaagcttggacttacgaatcgaacgagttcggagctgatccttcctggtggaaagggcatcaatgtttctacagtgcttggtaatcttggcatcgagaatactgcacttggatttttagccggatttaccggaaaagagattgaaagaagactcaaagagatgggagttgcatctgattttattgagatcaatgaaggtgtatctcgaatcaacctgaagttaaaatctatcgatggaacagagattaacggaagcggtccggtgatctcagcggaagatgtagagaagctgatggagaagcttgacaaacttggagaaggtgatgtcttattcctggcaggaagtattccatcatctatgccggatgatatgtaccagaagattatggcgaagcttgacggtaaaggcgtcatgatcgttgtagacgcaacgagagatcttctgttgaacgttcttgaatatcatccatttttaatcaaaccgaacaaccacgaacttggagagatttttgatgtggagcttctgacaagagaatctgttgtaccatatgcaaagaaactgcaggaaaaaggagcaagaaatgttcttgtatccatggcaggagaaggtgcagtccttgtagcagaagatggaagtgtttatgacactccggcgccgaaaggggaattaaaaaacggtgtcggagcaggagactctatggtagccggatttatggcaggctggatggagaaacatgaatacagacatgcattccatatgggagttgcatcaggaagtgcaagtgcattttcagagaatctggcaacaaaagaggagattgccggagtatatcaacaggttgtaaaggaggatcggtaggatgagaattacagatttgctcgataaaagaagcattgcctttgacaagaatccggcgaataagcaggagactttggatatggccgtggacttgatgtgtgcaagtggtaagatcaatgacacggaagcctacagaaaacaggtttacttaagagaagaggaaagtacaacaggaattggtgagggaattgctattccacatggaaaaggtgattgcgtaagcaagccgggacttgcagcaatggtcattaaaaatggtgttgatttcgattctctggatggagaaccggtaacactgttattcctgattgcagcaccaaatacagaggataacgttcatctggaagtacttagtaaattatcaatgatgctgatggatgagcagtttacagaagctctgagaaatgcaacatctgcggaggaattcctttctattattgataaagcagatgatgagagagctgacattgatgagcagctggcagatacaggaaatgcagagagcgattttaagatccttgcagtaacagcatgtccgacaggtatcgcacatacatatatggcagcggaaggaatcgagaaagcagcaaaagctgccgactgtttcgtgaaaatcgagacaagaggaagcggcggagcgaaaaatgtgctgacagaccaggaaattgctgatgcggattgtattatcgttgcagcagacacacaggttccgatggaccgttttgacggaaagaaagtaatcatctgccaggtgtcagacggaattagcaaggcagatgagctggtggcacaggcaaaatcaggaaatgttccggtcttccatggaaataatccggcagcagcctcttcttctacaggaaagaaaagcggcggtgtcggacatcagatctacatgcagctgatgaacggtgtttctcatatgcttccactcgttgttggtggtggtatactgattgcaatcgcatttttgatcgacggaatatgtgtagatctgaatgcacttccggctgatcagagagcaaactttggtatgatcactccggtagcagcagtatttaaacaaatcggtggaactgcatttggattcatgcttccggtgcttgcaggatttatcgcaatggcaatcggtgaccgaccggcgcttgcagttggtcttgtaggcggtatgatggcagcaagcggaaaatccggattcctcggagctcttgtagccggattccttgcaggatatatcattgtacttcttcgtaaagtatgcgataagcttccggatgcactggaaaaaatcgcgccggtacttatttatccattgatcggagttcttctgatcggacttgctatgatgtttgtaatcgagccaatcatgggtggaatcaacacaggcctgaataatgcattgacaggcatgggagattcaagtaaagtagtattaggactggttcttggaggaatgatgtccatcgatatgggtggtccgttcaacaaggcagcttatgtattcggtacagcatcaatcgcagctggtaattatgatattatggcagcagttatggttgcaggaatggttccgccatgtgccatcgccctttccacactgttgtttaaggataagtttacaaaagaagaaagagatgcaggcccgacaaactttatcatgggtcttgcatttatcacagaaggagcaattccatttgcagcatctgatccgctgcatgtactaccatcttgtatcatcggttcagcaattgccggtggaatgtcaatgttgtttggatgtacactgatggcaccacatggtggaatcttcgtattcccggttgttggaaatgcagtaatgtatcttgtttccctcgtagtaggaacagtcatctccgcagtactgcttggactccttaagaagaaagttgcataaagcaataatcatttggatgaaatgccgaataaaataatctgtcaaaaccaataaaagaaatataagaatcaggacctgaagttgtggatctggaagcggatgcttgagattcatggcttcaggttcttttttaaaaggagatattaaaaatgcttacagaacaaagatatcagattatattggatttgctgaaagagaagaaaagtgtcacagcgacagaattgaaagaaatcttagatacatcagagtctacggtaagaagagatattactgcacttcataaagccggaaagcttatcaaggtatttggcggagcggttgcgctagaagatgaaggcactgtctctgcttatgaaccgacagttgagcagaagagcgaactctatgtgaaagagaaaagaaaaatcgctcaatatgcggcagaactgatcgaggaggaagactttatttatctcgatgcaggaacaacgacaggttatatgattgatgctcttggatataccaatgcagtttttgtgacaaatgctgtttcacatgcacagaggctggcagctaagggaatcaaagtgtttctgattggcggagaacttaagaattctacagaggcagtgatcggtgcccaggcaatgaagaatctgcaggaatatcattttaccaaaggattctttggagcaaatggaatcacaaaagcagaaggattcacgacaccggatgcgaatgaggctctggtgaaacaaacggcgatcgagagatgcaggaacaggtttgtccttgcagatcattcaaaattcggatgtatcagttcagtgacattttctgcttttgagaatgcaaagattctgacagattgctgtccggcagattatcaggagctggattgtgtgataggggtggaagaaagaaatttgatttaactttgtttcttagcgtgcttgttagttgtatagataacaagcacgctttttcaattgtccggatacggacagtttatgttgtcaacatccttcttgcctcttcacggatgtattacagctacagacagtgttctccagaaaatgttagaagtaggaacaaaagcaccagattttgaattaccggatcagaatggagaattacataaattaagcgaatatcttggaaagaaagtaaaaaagaaaaactacggaaaagtatccatgggtgtgatcagaacaacatattttattgacgaacatggaataatagtaaaagctaatgataaagtaaaagcagcggatgatcctgaaaaaatgctgcaggaattaagcagatgaaaaacaaaaggaaggaatggttgcatgaataagaaaaaatcaaattcaaaaaaggcagttatgataggctgcggattcgtaggctcagcatctgtatttgcgcttatgcagagtggattatttactgaaattgcgttaatagatgcggataagaataaggcagagggagaggctatggatatcagtcatggaataccgtttgccagccctatgaggatatatgtcggtgactatgatgatgtggcagatgctacgattgttattatatcagcaggcacagggcaaaagcctggagaaacaagacttgatctggtaaataagaatgtggcaatatttaagtccattattccggaaatcgccaaaagagattttggaggaatccttctggttgtagcaaatcctgtggatattctgacacaggttgcaatcaaactgtcaggacttccggaggagagagttatcggctcaggaacagttcttgacagtgcaagacttagaagcaagcttggacagcatttatcagtggatagccgaagcgtgcatgcatttatagtaggagagcatggagacagtgaagttgtggcatggtcatctgccaatgtatccggtgttccgcttagtgacatgtgtgagatgagaggacattataatcataaggaaaacacagaggaaatcgcagttgccgtcaaaaatagtgcctatgagattattaacaagaagcatgcgacatattatggaattgcaatgtcagtaaaacgtatctgtgaagtgattatgcgtgacgaaaaatcaatcctacctgtatcacacatgatacatggagtatatgagattgatgatgttgtattaagtatgcctgttattgtgggtgcagacggaattgaatctgatattccgattaatcttagtggagaagaagcattgaagctaaaagaatcagcagacgcattaaagaatataattgacacattaaccctatgaagcgttttggagatcctgaaattgatgatgattgatttcctgagatagtgtataatgaacggtaagaatatttgggataaggagaaattacaccatgtatgaaataatgactgccgatgaagcaatccggctggttcgggactgaaactgatagaggtttggtacaactaacaagaataggagcgtgacatgaagaaaaagaattcttatagatggctgatatggatttttcagacctttataacatcatttacggacacaacatgaacaatggcagtatgttcggcagtctgaacaaatacaaggatgaaggcttctggaaaaagaaccagtactttacggtctataccgaaagcactgcctaccgctatcagatcttctcctatgaggatgcagtagttggcggcaatgtatataaagtcggttatcagccgggggaagaataccagacgttcattgacgagatggtgaaaaattcggattttgataccgggatcagaccaaagtcaagaaataagatcctgacgctgtctacctgtactgatcatgatagcagcaaacgattcgcagttcatgcggtatgtatagatacacagaaaacaagtgaggaatgatcatggaaaccaaagagaagccgagagcaaaccgggaagttgttgcagacgactgaaaaaaaggctatactcataataaccaattgaggaggtgatctgtacggaaaatttaaaaaaactgccagttggctttgatgatttcaagaagattcgagaaaatcatttttattatgtagataagacacaacttattgagcatcttctgcaaaaatggggcgaggtgaaccttttcaccagaccgcgccgatttggaaaaactttaaatatgagcatgcttaagaacttttttgaaataggaacagatgagaccttatttgagggactttatatttccgagaatcagaaactctgtgaagaatatatggggaagtatccggtgatatttttgtcaatgaaagatgttgacgggttgacgtatgatgaagctgaaaatgcattaattcagctcattggaagtgaggctgcaaggttcacttttttattaaacagtgataaactttctgaaacagaaaaggagcagtatcgtggtttcacaatcatccaaaacgggaaatattgtatagacaaaggtttcttgatttcatcattgaaagttttggcacagcttttatataagcattatgatcagaaagccattattctgatcgatgagtatgatgtgcctctggataaagcattccagcatggatattataaggaaatggtatcgctgatccgaggcttattcgggcaggcgttaaaaacaaacagttttctgcagtttgctgtactgacaggctgtcttcgtgtgtcaaaagaaagcatttttacagggctgaacaacttcaaagtttattcggccgatgatgttcagtatgacgaagaatttggatttacaactgaagacgtcaagaagattctggcagcctacaaccaacaagaccattttgaagaaatgaaagaatggtacgatgggtatcattttggaaatgcggacatttactgtccgtgggatgtgattaattacatcgatgatcttatgagtgattcaaaagcaaaaccaaaggcgtattggatcaacagcagtggaaatgatcttgtgaagcgttttatagacaaggctgatacgaccaccagggatgaaatcgagcagttgattacaggaaaggctgtccagaagagaatccggctggatctgacttatgatgagattgataacagcgcagaaaatgtgtggagtgtactgttcacaactggatatctcacacggcttggtgagtctgaaaatggaatgtataagctggtgattccaaataaagaagtcttggaagtttttgttcttcaaatccgggagtggtttgaccgggttgttgcaaatgaccaggcgtctacaaagaaaatcaactgtggatttctggaaggaaaagtagaggatatagaacaggaactgacgatgttccttggggaaacaatcagcgtgctggatacaaaggcacggaatgaggaaaaagaaatattctatcatggcattttgattggcattctgaaaagcaaatctgattgggcggtcagatcgaacagagagtccggagatggattcgcggatattctggtgaaacctaagaatccggatgcagggattatcatggagttgaaatatgcaaattctttcaataatctggatcaggcatgcgagagggcattggaacagatcaaagaccgaagatacgaccaggcattacgcgaggacggacggaacgaaatactcgcatatggaatcgcattttataaaaaacgctgtaaagttgtagtagaaaggctctagtttgatataaaaatatttagattattttgagaataaatatgaaaatcagtaggtaaaaaatcctcctccgattgcgcagtcacacagtcggaggagaatttcttttgaacatcatttacggacacaacatgaataatggcagtatgttcggcagtctataagatcctgacgctgtccacctgtactaatcatgataaaatacattgacaaactcaagataacatgaagtcgagaaccaatttagaagttgaaaaaaattggaaagataatgttagaatcaatggtaatgagaaaagaagtacgagattagatgtttatgataaagacacaaatacggtatatgattacaaatttgtaaagaatcctggcaaaggactttccaaaagacaagttgaaaaaataaagaaggaaggacctttaggattaagtaatgaggacataatagaaattaaccctaattaaattattgatttgagctattgcaacaaatatgttgcaatagcttagaaaagaggaaaatatggaacgaccaaaaatatataaaagaaaaattacaaatgattggcagaaatattgtcctgaattaagtaaattgcgtatgctagatatagataatagagtaggtcctttagttatcgggttctatttgcaaataataggggatggaacgatttatatgcctttatataaagtgggaaatctatacagccattatagtgtattaccttctagtttagaaatagaaggacgatcgatggatatgcaaatgcatgaaatttatagtgaacaaattgcccaacaattaatccaaaaagcatatattccgttacaaggggaagtgacttttgaggacgtaaagaatggatatgaacgatattttaaaaacccaaataaaggaacaattgtagaatatgaggattatgtatacatcagtagctggacaagaaaaaaagaactttttgataatgcattgcatacggtttacaatgaattaaaatcatggccagaagaaagatattttgtacgagatggtggttttaaaaattggatgttggaattggaaaaaaaagctagtaatcatgaagtattagaagcaaactatagaatgaaattcgaaaaatataaaattgaaaaactgccggaaagacccttctgtttttaatattaaatacagggaaaaagaattatgaatttagaaaaaatagaaaagcaattatatagtgataagtttttagatgaaaaaaataattacatttatgcatcacttagcaataaaataggtggtcttattgggagcgttaagggattagtattgctgagtgtatatgaagatattttatatattcaccgagccaatattgataattcttatggcaaacaattagcaaaaatttatattccaaatatgaaaaatatccaaggaaaagccggattatttggtggaaagttttctttcaagtatgaaggacaagaatataaatttaaactgccatcaaaggccggaaaatttgtggatttttttgtaaagtaaaagtatgaggataacaggatgaaaaacttacaaaagtatctaatgattttgggaacgataatgttaagtattggaattagtgcgtgctctaaacaaccagacttcgatgccaaatcttacgtccaaagttctcttgatgcatactatcatggagaatataaggactatgcgaatctgttagaactctcggaaaaagatgcaaagaaagaaatcgaagaggattttaatgagagcatccaaaagcaatttgatgattccgataacattacggataaaggaattgctgattatacggaaaaactgacagaagtaaagaaactggcaaaatacaaagtgcaggatgtgaaagaagaggatggagtttatacagtaagtgtacaagttgaaccatccaatgtatttcagacattgcaacaaagctcttcagaggtaagcaatgaaaaaataaagcagggattggatggaaatgatccggaagtctttgcagccgtattaacagaaagtgtccagaagagtcttgaaaagaacagttatggaaaaactgttactgtaaaagtatccgtggaaaaagataattcaggaaaatatggtctttcggatacagagatgaataagctggaagcagcgatgttcccaacagaataagaatgaatggaaagctatcagaggaaaaactggtagctttcttttatcttcaagacgagaaaagttctggcgatagtaacgtttaatcatcgatattcttattttattttctattttaccaactaatctggcgatgcattttacgatattgtctgggagttataccagtgtatctcttaaaaatagaaataaaataactttgagatgaaaaattcaagtaagtactgatttcacccagactatagtcggaatgtgccagtaaattctgtgccttttcaataagaactttatggataaaaacagtaagcgtctgtccggtttctttatggaacagggcagacagatatttaggtgttaaattaactaaagatgccagttgatttaaggttaaagttttatttttaccatgatagatataatcaatgacgcgagaaatagctggtgaatagtagttttttggcgtcttttttgcttcagcaacacgaagcgtaaattcaatagccatctgttcatttaatttcattaaagcgtcaacatcggtacattgttccatttttcgtatatatacatcacttaaggaaaaagcagtttcctcattaagtcctccttcgatggcatatctggtaactaaagttgtattagcaatacttgcataaaaaagtaattttaatttggaattggaagaggtcatctttccgtaaacagttgttgggagtgaataataggtattctccaatgcgtgaatatctccgtttgaaacacattcgagaattgctttttcctgtgcataagatgtatgtatccgttcattttctgcattttccaacatttcatgtgtgagtgaaaaattgatgtctgacttcattttatacataggtaattcctcctgtcaaaaacacgataaattgacataaaacacgataaatcaatataattatatgccggaaatagataaaatgcaattaagagattaagagagaggagatagatgctatgaaacgaaaagaagtaatttttttactggcaatgctgttagttggaacttctgttggtggttttgcatatccaagtaattgttatgcagcaacagcagagacagaaagttcttcggaacaaagtatttattcactggccaatcattattttaaaatcaagtctatcagtaatgggaaatacttgcttggaaataaagcaggatatgaagctcaggcagatacagccgatagtggaatgacattctactttaaagcatctgacttgagagaatatattctttttgatcaggatagcaagtatctcacatataacacttttaatgcaattgtccgaaatacgacattgtcagataagacgcgatttaaagtagagcagtatgaagataattccttttctttttattcttatgttaaaaagaaatatgttggaattaagggaacttcactggtttggaaagacaatgtggatgatacatgccggtttgaactggaacttacagaaggaaataatccgtttccggaagcagatataaatatttatttttatgacggggatgggaatccaataacgacatcgaacgtgatggcgagaccgtcaagtggtgaaaacattatcggaacagcagatactcatgcacatttgtgtcataacaaaggatcaggagaagttgtatttaatggagatgcatttagtcccctgggaattgcagatgcactcaatgattgtacggatctgcatggagtaaatggagcgtatgatatttggggaaaagcagtagatggtgcaacgacacataatacatcgggatatccaaattttagttactggcctacaagttattctacaaaccacgaacagacatactataaatggctggagcgttcctatctggcggggcaaagagtgctggtacatcagtgcgtaaataatgaaatattaggaaaagttaccaatgcacttccgccttataaaaatggcgtaacaaatgatatggacgcaatccgacaggaaatagagtatgtatataaaatgcaggattatatagatgcacagtgtggtggaccgaatgaaggatggtttagaattgtaacatcatccgaacaggcaagagatgtgatcagtcagggcaaaatggctgtattcttaggaattgaagtagacacaatttttggtgcagatacggattttgttggaaaatataatgctggagaaatcacagaagaagaaatgaacacaggtctggaaaatatagaaaagcaattggatgaagtatatgatctagggataagaagtttttatatgatacatgcattgaataacggtttcggtggatgtcagttatatcagggggaaatattcagtattatgaattacctgaaaacatcagatttttatcaaccagaggtaagcaccaatccaagagtattctacaaacagccgaaagcagatcttccagaagatgcacagggacatgccaatgttgagggacttacagagactggaaaatggatgattcatcagatgataaacagacacatgattatagaacttgatcacatgagtgacaagtccttaaatgataccttggatatcttatgggaagaaaaatatccgggaattatatgttctcatacaagaattttggatatgtttaatccagaagatgaggcatgggaacaattggatattccacgtatgataaaaatatatcagcttggtggaattatatcacctatgatgtgggaaacaacaacaggacatcagagatgtgcaacggattatctggaatatatgatagaactgagtaataattcagaaacaccgactacaggaatattagataatcaaaattactttaaatatgacggaccatacgaagtgccgactacatggtataacatgaatgatgatgagtcagatgacatgattcttggaataccgtatggaagcgatgttaatggtgcatgcatgttaccgaactttgataaagtacaagaaagtttcgatacagttgattatgacacttttacagatttatatccgggaatttatgcggatggagtaacagcaaaggttaataaacaaactacaggaaatgtcacatttgatgttaatggtgatcgtggtgttgcacattatggtttagtaccagatttctggaaaaagatgtcaaccaatagcgatattgtggatattaatgcaacatttaattcggctgaagcgtatatcagaatgatagaacgtgcagagaaatactcagatacatatccaagcagagatgaatcacaatggataacaacttcgacagaatattggcattagatatggactttgaaagaggggataagccatgaacattgataaaatatgtgaacagttaacaatagatgaaaaaatccggcttttaggcggtgttggtgactggcatacttatgactgtaatgggaaaatcccctctattatgatgacagacggaccacatgggattcgaaaactggagcaggaaaaggttggggatattgaaaccagtaagccagcaacctgttttccaactgcaagtgcaatagcctgcagttggaatcctgctattgttaaaaagatgggtgaagcgatcgcgaaagaagcaaaaaaagagcagatatccattgtgttaggctgtggaatcaatatcaagcgttctcctttatgtggaagaaattttgaatatttcagtgaagatccgtatttgacaggaaagctggcaacgggatatatcgaaggggtacagagtcttgggataggtacgagtttaaagcattatgctgttaattcacaggaaacaagacgaatgacatccaatagccagattgatgaaagaactcttagggaaatatatctgtcggcttttgaagaagttgtgaaaaaagcaaaaccgacttctgtaatggcttcatacaacaggattaatggcgaatttggagcaagaaataaatacttactgacagatgttctgagaaaagaatggaaatatcaaggtggtgtggtgtcggattggggagcagcaaatgatattgtaagctgtatgaaaaatggtctgacactggaaatgccagatccgaaaggcttccacacagatgtgttaaaagaagcgtataaggatggccggattacggatcaggaactggataactggactaagaatgttctgcagaattttgtatcacttcataaaaatatagaagaaaattatgaggtagatatggaagaacagaatcaggtggcacgtaaactggaaaatgaaagtgcagtacttttgaaaaataatagtgttttgccaattggaaaagagaagaaggtaatcattattggagagcttgccaggcagatgcggtttcagggaggtgggagcagtcatatccagccgacggagatgacaaatgcgattgaagcaatacgtgaaaaaggatatcaggtaacttatatacagggatatcagaatgaaaaggaagaattaggagaaaagcaactacaggatacgatagaaaaactgaaacaggaatatagaaaaaaagattgtgtgattctatattttatcggtcttacagaatcttacgaaggagaaggatacgacaggaaaaatcttaaaatccctcaaaatcaggaaaagctgttggctgaaattgcagaaactgttggaaaagataatattgcagcaattagttttggtggtgcacctatggattttagttttgaaaagaatgtaggagcaattcttcacatgtacctcggaggacaggctgtaggagaatctgttgctgacttaatcagtggagaagtgaatccatccggtaaattggcagagacaattccgttttcagaaaaagatactcctgcatggagatattttgcacctccgaatgatgatgtagaatacagggaaagtatttttgtgggttatcgttactatgagacattccatgttccggtaaaatatccgtttggttatggactttcctatacttctttttcctattcggaattgaatgtatcggaagtgtatagtggtggaaagatacaaattcgttttaaaattaaaaatatcggaaaagtgagtggagcagaaatagcacagttatatgtctgcccgaacgaatcagatgttatcagaagccatatagaattaaagggatttcaaaaaatatatctgcatccgggagaagaaaaagaagttatactagagctggatgaaagaagtttttccgtctatgatgtagagaaaaaagccttttccatgttaagcggtaaatatcagatctgtatcggagcatcggtacatgatttgcaattaaaggcgaatatagaagtagtaggaaatagttattttagaaatgaaagagaactgtttccggattattttagagagcagccacatggaatggaaatcagtgcagaacagttttatcagctattaggcggtgaaccaaaacatgacaaagaaaaaaagcgtggagagtatacggtttacgattcctatcaggatgtggtaaatgtctcaatgtttggaaaatttgttcgtggaatcgtacatatcggacttaagattatgcttcggggaaaatcagagcgggacccggcctttaaaatggtaaaaatgggagtcgaagaaggaaatctggaaggtctgattgcaaccagtggtggaattgcaactccgaagttaatcgatatgttagtttacaatgcaaataaaaaatatttgcaggcttttaaaagactgctgaagaaatagagagagggggagtcgtatatggaaaacaataaattggataaacgcacaaaatggagctattgtataggagcaaccggaagagatatggcgtatgcactcgtctctatgtttcttcttacatatattcagtatacgatgaaactgacagttgcccaatatgcagtaatatcagcaattatggtagtgtgtctgctgtgggatgccattaatgatccaatgatgggaattattattgaaaattcgcatttgaaagccggaaaatttaaaccttggatttttataggagtaattttaaacagcctggtaattatctgcctgtttacagtaagaccggaaggatggggatttgtcgcattttttggagtgggatatcttttatggggaatgacttacacaatgaatgatattgcctattggggaatgctgccgagtcttacatcagatccgggagaacggaactggctggtaaccgtacagggaatttttatctgtatcggacagttttctgttgcgggtctgctccctgatatggtagcaggaaatgcgattatggcgtatcggacggctgcgattgtgattgctttttgttttattggtttccagcttcttacagtgtttggagtaaaagagagaaaacggccggaaaagaagagaacactgtcattaaaagatatgtttcatatatttctgaggaatgatcagttgatagtgattggaattgcatgtttattattccaaatcggaaatggtcttctgattatgattggaatgaatttcttttattttgaatttggatattctgtaggtggcagtcttgtattttggtttacaattatgtatggattaggaacgctgatatcagaggcatcttttgcgtggctttcctcaaaattcacacgaaatcagattataactgcagctaccgtcattacagtcattgggtatatgctttttatgagtgtaggctacattttaccaaagagtgttgttttactgaatatcatcggtttcctgatcttcttttcacagggggcattcaatatgacgatgattgtcatgttaaataatactatagagtatgatgaagtccggtttcatgaacgacatgacagtattatctcagcagtaagatcttttgcaacaaagctggccagtgcagttgatcaggcgattgttgcgttaatactgattataagcaatatctatgcaatcagtcagaaaatatccggattagaaataaaagctggtataggagaacttacttcggaaaatgtaattgtacaggcagataaatttatccagacagcagatgccggacaaagatttatattgcgtcttggaattgtagctgttccggtaatttctataggagctgcttatatactgattaaacggaaatatatcattgacgaacgtaagtatgaagaactggtagcggaaataaaaagcacaaataaaaaatgattcaattagttgtgatgaccttataattgatgagtttagaaaaaggtgatatgaatgacaattgatgattttatatatgaaaatagtattgtacgtgataatggttctgaatatacagcagatcatatagatagggtgatagaatctgtttgtaataattatggattaactaaaaaaatgatttctacaaattatgtttttccacgtattataaaatcatgaacaaacacattttaaatatgagaatgataaagttcaaaaagcatttgatttaaagaatatagaagatatgctagatatagtacatagactttatgagaattatgatgaatcatattgtaaagaaaaatatttgaaaagtaaatcagaattattagaaatgattaattctgcaatgtcagatactgatttgaaagaagaactgttatgtgatacatattcatttaataattgtatctcggtatatagaaaggtttgggaaaagaaatattcagaaaaagagattattactaaatgttcagaaacaattcgtatcgtgaattattataattctatattgatttcattaaagactttttggcaaaagtgtaattgcaatattgatgaagtaaatattcatcaacaggcgatatcaatgaggatgtatctttttgaagttatttctgcaatacaaatcatacaacaagatttgcaagattacgaagatgaaaatctatggaattataatggttttgaggacaattataatcttgaaaatatgttgtattcttatttttttaatgaaaaggctcttgaatattggaagaatatattctcatctgatacttgtgaaaaattatcagatcaagatatatataaattgttaaattggaggtaagaaaatgaaaattaaacttgaagtagcttatacgaatgaagaaacaatcagtcaattagattcagcgttggaagaaatagaagatattaaggttgaaaaatttgaacaaaatgggtttgatggtttcgatcttttatattactttttggaaacaggtacggctgttgttttaatagaaaaactttgtaagattattattgcatttataaagagaaatgattcgaaaagttttaaagctaatggaatagaatgtgttggctatagtgaaaaagaggtagaaaaattagttgagaagataaaagaatcaactaaaaatgaatcagaataataataaatataaatggtatagagaaggaatggaaagctatcagaggaaaaaactggtagttttcttttgcttcaaaaacagagacttgttaaaaaagctattgtaataagcgaatcagaaaagttataataaatgataatggatggcaagaggtcatccattcattagaaaaaagaaggaatccccatgaaccaacaagaaatattcacatacatccaaaagcaataccccgtccatccagacaccatcaccaaatccggataccccgtcaccatcttcaaaaacccaagaactgccgcaccttatgtcatcttttaccaatcagccgaaagaacaactttcatggaagttcaggcagagccggacatgataggcaactacatcgaaatgtaccatcttgctccggcaaagcacatggatcagaagcactggctggcagttccgctggacggttctgtcagcgattcaaaagttctggatttactcgatatgagctacgacctcgtagacggacaggcagaagcagatggagaaacaggagcagatagacagataggggcagacggacgggcaacagacagtacgccagaagaaaaagattgacaattctgaccacacattccataatgacgatagtggttcgagagaactaacaggaaaaatgggagagacaacatgaagaaaaaaagctcataccgatggctgatatggatcatattggcagtggttttgatcggggtagcacttatgcatatcctgcccccatacatcgaccgatggaaatctgccagagattatgacaaacttgccgaagagtatgtaaatgatgagtccgaaccagatgatggaaagcagaagaaaaaagactggtgggctacagatgtaaaagtagagtttgacaagttgaaagctgagaatctagatgtcatcggatggatacggtttgataatcaggatgaacttggcatcaattatccaattctgtattcaggagacaatcagaaatatctgagaaccgacctgcatggcaacagtcacatcgcaggatgtatctttttggaaggccttaacaaatctgatttttcggattattacaacattatctacggtcataatatgaatgacggaagcatgttcgggagcctgaaaaaatataaggatgacggtttctggaaagagaatcaatacttcactgtatattctgagacaaccgcctaccgttatcgaatcttctcttatgaggatgcagtcaatggcggtgatgtatacaaagtaggataccagccgggcgaagagtatcagaaatttatcgaccagatgataaaagattccgatgttgatacaggagtaaagccgcagaccagtaacaagatactgacactttctacctgtacagggaacggatacagcaagcggcttgccatccatgcagtctgtattgacgcacaaactacagatgagtcaaaattaaaggaaacaggaaattaactatgaaaatatccaaaagtatgtcgaaaaaatatccaaaaacatgtttttggatgagcgtgtagatgtatccggtatcgagattgagaatgttgtggcagtacgttatgaatgtacacaaaaaggctcaggcaataaatggccatctatgagagaattcaaagtatccacaacaccggagacaggagttgagtttacgaaagaagtcatccgtacacaggacggatgggctccatatcaaggagaagaaagtaacttgattgacgaaaatacacagacatcaatctggtataatgtaagacagaatggaaatccggcaaatactacaatcaaaggtgactatgtcggagtgaaattatcacagccaatcacgttaggtaaaattgatattttacagggtaagaatggcaatgatggtgattacttcaagaatgtaaaattgcagtattcagtaaatggaacagactggaaggatattccgggtgtagagccgtttaaaaatacaagacatattcaggtagatctttcggacaaaaacatcgaggcacagtatcttcgtctggaaaatcaggaaaatcaggagagctggattgctttcagagaatttgatgtagatgcacgttatgtacgtctcatcaacaagacagatgcgaagaaaacattcgatattcagaagttgtcattgaagacatttgagatttatgaaaaatcacttgtagctgatcagacaacgtttgcaatcggtgaggcggcaagcaatccggcaacaaacctgtttgacggagaccgcacgacacaggttatctatcagggaagccaaaatcagggcgcaaaatttgtctatgatctgggacagacaattgacctgaagacattgaaagtagtatgtagagacagtgagattgatttcccacatcacgcaaagatttcagtatcaacagatggtcaaaagtggacagatgtgatgacaatcggtaatcaggataaagaaaatgaaggcgaagcttcaaacgaagataatatcaatgatgtacttccgttacatgagacttcttacaatgcaaaattggaagaaaatatcaaccagaaagctcgttttatcaagtttgagattacaagaacaaaagtaggttcagataaatgggtgagattccaggaatttgagatcaatggcggtgagtatatgccgacagtgaacgacccgacatttgaaagtgactgtctggatacaagaaacggaaaatatgcatacatggtagatgctgatttgtctacagcatttgttccggcaaaagaaacaggaacattgaactatacagtttctgacaataacaatgtcaatgtgattaagatcattcagggagcagacgcaatttccaatgcgactgtaaaagcccgcacattgaaaaatccggacaaatggattacacttggaacgcttgcacagacagtaagcaggcatatgatgcggcaattgcagcaggtcagaaagtatatgacagcgaacatgcaagcaaaggaagcgttgacagcgcagtacttgcaattaaaaatgcagtggcagacaaagagttgaaaggcgatatgtcaaaattgcaggcagcattggacaaggcgctgaaagattctgagaactacacagcaagaacatggcgtgtatacagcaacgcagtaagtgcgattgaaacagcaatggaaaatgcggataatacatcagtagcagatgtagaaaaattacttgcagatttagaggcggcaaaatcagcgcttgtatacaatccgtctgcaatggaagaatgtatgctcgcagtgcaggcagaaaatgactttatcaatgcaacagataaatctatctatacagaagagtcttgtaataattttgttgcggcaaaagaagcagtggaacagctgattgaaaagaacaagacaacaccggtacacccatcagaatttaaagatgcattgaaagcgttgaaagatgcaaaagagggattgacttttgtaccggtagcacctgtatcaaaagaagtgttgtctggattgattaaaacagcggaaggtttagatgcacagctttatacaaaagacagctatcaggcattgacagaagcacttaacgctgcaaaagcagaatttgacagaacagacagtacagaggagtctgtaaaagcggctgttgacaaattagatgcagcgatcaaagcgcttgtgacaagagcaaatggtgaggaagtgaaagcttatatcaatggtattgagttgaaagatgcctcaaaatacacagaggaatcttacaaggtatataaagatgcatatcagaaactttgtggagtattagatcgtcttgacaatgtttcacaggaagaatatctgaaactgagaaatgcatttgagacagcggaagcaaatcttgtggagaaagatgctgctaagccagaacaaccaaaaccagataaaccacagcaggatcagaaaccagattcggatgacaagcatgaagttcacacaggtgacacaacagaaagtagtctgccaatggcatggttgcttgcaagtgttgtcgcagtgggcggaatattgatcagcaaaaagaaaagagtaaaatagtgaattctaacgagggaacgagggagagcggtatgctctcccttttcagatgctgaaatgtatgttagaatagggcaaagcattgacagaagacaggagtgtgtagatatggaccaaaagtgggatatggagattttgtcagttgaaaagtttgcggaaagatacgaggaattatttcatagaagttttgagtcaagcaaactgcattacattcgtttctgcaaggcggaaaattggagtcaggcagtggaggggacgtttgcaattccgcaaaaagaacatttacgaggagaaaaaacagcatttggatactgtgtattaccgaaccgatttatttttattgagtacgagacaaagatagaaccgatgctgagagagatgaaggactatccgaatatagatgcggcatctccgttgcagtttctgttcaaatttatggaatatctgctggaagatgatatgatttttttgcaaggatatgaagataatttggaggatctcgaggatgaactgttaaataacaatctggaagattttaaccgcacgattctggctatcagaaaagaactttctgtgctgagttcctattatgaacaattatccgatatgggagagacgctaaagcagaatgcggccgagcagggggctgagaaagaagagttattattttctttgttatgtgaaagggcgggacggttttattcgactgtccaggaattgaaggagtactccatgcagcttcgggagatgcatcagacacaggtggatatcaggcagaatgagattatgaaatttctcacgatcgtgacaaccatatttatgccactgacactcattgcaggatggtatggtatgaattttgtccatatgccggagctttcattgcggtatggatatgtggttatttgcggcatctgtctgctgattgtgttgattgagatatggttctttaaaaagaaaaaatggttttagaaaataaggagaaaaagatgggaatagaaatacaatttttagactggctacagacgttacatagtccaatagttgataaaatgatgcttgggatcacgcaccttggagatgcgggaattttttggatcgtgttggcggtcattctgcttttgatccagaaaacgagaaagagcggattgatcgtggcagcggcattatgcattgatgtcattgtgtgcaatggaattttaaaaaatctgtttgccagaacgagaccgtttgatgtcaatgaggcagtgcagcttttgattacagcgccaaaagatttttcgtttccgtcaggacatacggctgcatcttttgcggcggttgcggcgctttattttgcggggaagaaaaagctttggaaggtctcgcttgtgcttgctgttttgattgcattttcacgaatgtatctgtatgtgcactatccgacagatattttaggcggagtgcttgtcgggcttggagccggagcggcaggttattatcttgttatcacattgcaagaacgaattggaaggaggaagaaaaatggctcagacgaactgtgagagttgtatgaattacgagtatgatgaagaatatgattactatgtatgtatgaaaaatctggatgaagatgagatgtatcggtttgttcggggagaatttcgggattgcccgtactatcagttcggagacgaatatcagattgtgagaaaacagatgtaaaaaggctgtgtgcagtgacacagcctgacacattctgagacttataattcatcaatcattttttgaagaccttcatagaatctgccaatatgaacgccgtcgattatgcggtgattgacttccacggacattccgagtgtctcacgaccgttttgggccatgatctttccccaggtgattcgtggaatcatatcatcgatatccagattacgttcatgggtacatccggtaaggtcaagccacggaagacaggacatatagatcagctcgtcgccttcttcggtctggtcaataaacgtcgtctgtgtatgacttttttcttttgcaatacggcagaatttttccatggaatcctggcagcggacagtgacaatatagaactgttcactgtctttttttatgtctgtaaaacttggaatccgctcttctaaaagtgcaacttttccatcatggattgtatagcggaaattttccacttgatttatcgcttttgtaaccaggtaggtcagtgcataatagaaagaaataccatggcttttggtgtatttgtgaagctgcgtgacatccacacggaaagttgtactgtaaaatggatgatccacagtagaaaaaaagtcaaataattctgctcgtgaccaaattaatttgtcaatatatttcataacaactcctcctgaaaatatttattatattataaaacaacaaaaaagaatgttcgataaataaatttattgtcaaagttgacaatgtataatagcggtagtatcatcgaaagaggaaagaatagaaaaaagaagctaagatgaaagagaggttatggtgaaaaaaggaatcaaacagtttcttgcagggatgtgcgcagtgttggtcatgccgaccggaactgtacagaatgtgcttgcaaaagagtcggaacaggcattgccggtatccgcggaaaagtcgatcaatcaagaattgaaattatggtatacttcgccggctaagatcgacacagcagaaacaaatggcggcgagtggatgcagcagtccctgcctttgggcaatggaaatctgggaaatctgatttttggagggattgcaaaggaaaggattcattttaatgaaaagacgctttggacaggtggaccttcatcaagtcgtccaaattatcagttcgggaataaggcaacagcgtataccgatacggagattgaggagtatcgaaagcttttagatgacaaatctacaaatgtattcaacgatgacaaaagtcttggcggttacggaatgggggcaaagattaagttcccgggagagaataatctgaacaaaggaagttatcaggatttcggagatatctggcttgatttttccaagatgggaatcaatgataacaatgtaaaggactaccgcagagagctggatattcagaccggaattgcggcgacagagttttcttgcaaagacgtgacatataagcgggaacattttgtgagtaatccggatcaggtgatggtgacagagctttctgcatctgaaaaaggaaaacttgatttgaatgtaaaaatggagcttaataatagtggtttagaagggaagaccacttttgatgaaaagaatcagacatgtacgatcgaaggaaaggtaaaggacaatgatctgaagttttgcacaacgatgaagctcgttctgacaggtggaaaactgagcgcagatgaaaagaatcaagtctatcagattcaggatgcagattgcgtgatgatcgtgatggcggcagagacggattataagaatgattatccgacatatcgggataagaacaaagatttgaaaaaagtagtcgctgaccgtgtgaacaatggaacgaagaaatcctatgatgagttgaaggaaacacatatcgcagaccatcagggattatttgacagagtaagtctggatttgggagaacagcgcacatcagtaccgacgaaccagcttgtggatgaatatcgaaatggaaattattcgcattatctggaagtgctagcatttcaatatggacgttatctgacaatcgcaggttcaagaggaacacttccaagtaatttagttggattgtggacagttggcaactctgcgtggacaggagactaccatttcaatgtgaatgtacaaatgaattactggccggtttatgcaacgaatcttgcagaatgtgggacaacgtttgtagattatatggataagttaagagagccgggacgcctgactgcggagagagtgcacggaattgaaggagcagtgaaaaatcataccggatttaccgtacatacagagaacaatccgtttggtatgacagcgccgacaaatgcacaggaatacggatggaatccgacaggggctgcatgggcaatccaaaatctttggtggcattatgagtttacacaggatgaggcatatctgaagaatacgatttatccgattatgaaagaggcagctctgttttgggattcatatctctggacatcggagtatcagaaaattaacgatgagaactcgccatataacggccagaacagacttgtagttgcaccaagtttttcagaggaacagggaccgacagcagttggaacaacttatgaccagtcgcttgtgtgggagttgtacaatgaatgtatcaaggcaggaaaaattgtcggagaagacgaagcacttttgaaatcatgggaagaaaagatgcaaaaactggattcgattgagatcaatgatacaaatggaatcaaggagtggtatgaggagacacgtgtcggacagaagaacggtcataaccagtcttatgcacaggcaggagatcttgcagaaatcgaagttccaaacagcggatggaatatcggacatctgggagaacaaagacatgcatctcatttggtaggtctgttcccgggaacattgatcaacaaagacaatgaagagtatatgaatgcggcaatccagtctttaacagagcgtggagaatactctaccggctggtcaaaggcaaataagattaacctttgggcaaggacagagaatggagagaaagcatatacacttttgaatcatctgattggaggaaattcttccgggcttcagtacaatctatttgattctcatggttccggcggtggagacactatgatgaatggaactccggtatggcagattgacggtaactttggcctgacatccggtgtggcagagatgcttgtacagtcacagtccggatatacacagtttcttccggcaattccaagcgcatgggaagaaggaagcgtacagggactgaaagcaagaggcaactttacaattggagaaaagtgggcaaacggcgtggcggagacatttacggtatgctatgacggagacaaagaaagcagtacatttacaggatcttatgaggatatcacttctgcaaaagtatatgctgatggaaaagaaattgaagtgacaaaagaagaagaaacaggtcgtatttcttttgaagcgaaagcaggaaagacgtatacaattgatatgtctgagacgaatgtggaggaattgaaagagaaggcaacagcatttttaaaacaactccatccggatctgatcaagattaaagaagaactgcagtcggcgattgaccgttcttcaaaagaactgggaagtattctgacaaaagcaaaacagatggatcaattataccgcacatatctgcaagaagcagagaacgtatattatctgactgatcaggaagggcttgcctacaatgagattgatactatttacaatcagttgagagaattgcgcaatacattgctggaaaacacaggggatatggaatactatcagaaggcagaaagtcagcttactgataccgcggcacaattagaaaaacagatggagaaccgggtgatttcatttagtaaagattccggaatcattggggaggaccgggcgcttactttgagtaagagtgagaatgctaaaaattatgagatccgctatacaacagatggaagtattccgagaaagacatcagaaaactacgagaaaccacttcagttgagtgatcaggaggacactgttgtcagagcagcattgttctataaagagcagagagtcagtccggtatatacaaagaaatatatgacagaaggtatttccgttaaagatttggtagtatcccatgaaaaccattggggagatacttatgcaaaagagaagatgattgacggaaatccggcgacaagatgggcatcaaaaggtgtagatacttccaaaccgatggagctcacattgacatttgcaaaagcagagctactcagccagatgaaatttgacctctttgtgtcaagaaataatgcgattggtgcatttgaaattcaagcgcttgtggatggaacctaccagacagtgtacgaaggtacaaagatgggggatatcaatgataaggtgggagatgtagatggaaacagcgaagggtatcatgcatattacttagcggaatttccggagatcaatacggattctgtaaaagtgatactgaaagcaggattcttaggcgaaccatctctgtatgaggtgacaccactttgtgcaggtgttccggcagataaagcgggtgacgcagcagaattggagagcatgattggattggcagaggaagcagaccgtacatcagactattatgtaaatgcaccgcaggaactaaaagatgcatttgaagaaagcatttcagatggaaaagaaatgttgaaagcatcacaggatttgatggattccagaaccgaatttttatcaaatagatatgaccgtcttggctttggggagacagataaatcggcgctggagacattgattgcacgggcagaagaagcgctgaaaggcgagtatacaaatgagtcgttgtaccagttaaagaaagtgcttgcggaagcaaaagaagttttggctgatgagagtgcaaagcagccaacagtcgatcagacagcgcagaaactgcaaaaagcattagataacttggaacagggaggatttgaagagatacaggttccttcaggagagctgcaaggctctgacaaatggattcaggcaggtaaattcaaggcgacagcagatgacaatgcgggaccgttgacgtatgaatttaccggacatttcatacaggttccgactgtaaaaggagatgaccacggagtcattcgggtgacgcttcaggatcaatccggaaaacaaatttatcaggaagagattgatacatatgcgcaaaaccgagtggaaggaacagagctgatgcaggaggaatttgcagaaggctcgtatacgattcagtttgagcgagtgggaaaaagcacacaggcacaggataaaagaggctgggttgaggttggcgcactgacgattcggaaagaaaagaaagaaatggtggatagatgcaagcttgaagaagaattgaagctttgtgagggtctgaatgaaaaagagtatacaacagaaagctggactgcgcttcaagaagttgtaaaaagtgcaacagaacttttgaaaaaaccagatgaagagacttgtacatctgagatgaacgataaagcagcggaagtagaagcggcaagggaaaatctccagaaagtgacggtagatatatcggaactgaaagaggtcattaagacagcgaaagcaatttcttcggagggatacacaaaagaaagttttgaggcactgcagcagggtatcagagaagcagaggtattgttaaatggcacatatacacaggatgaggtaaatgaaaagacggccattttgaaacagcgaatcagcggactgcgtgcggataagactgcacttcaagaaaagtatgataagattaaagatatgacacaaggtcaggcgacggatgagtcatggaaagagtttacaggacttagagaacaggcgaaaaatgtattggacaatccaaatgcaacaccgaatgaggtatctgaaatcttagaaaagctgaataaatttgaatttacatacaaggataaagagagcggagaagaagataaaaaggatccgaatccgggcacttcgggagattccgaacaacagggaacttctgatacatctcacaaaaaggagagtgtaaaaacgggagacactacagccattgctgttccagtcgcaggaattgtgggagtagcagtattgttgtatgtggtgagaaaaagacgaaaaatagaatcataatatgtaaagcggctatgaggcaaactcacagccgctttcattatacgttatatctgatagcaatacgctccattttctttgactccataaaaatcggcaaaggaaagatggaaaatatcttgttcttttccggataaatcaatctgatttttgattaaatactgataaataccggaatagtcaatttttccctgtagtaagatgctgtcaagctttccatctctgatgatggcacgtctgtaattgtgagcatcttcctcctcaagcacgatatcgccttcctcggcaacaccgcgaccgagggagagtgtgacgagcccgtagaagttcattgtgtttttcatggcgtagcggtctgtgtattccgcctgtattccgcacatattgagcgcagcaatctgtccctgcttcattgcatttggccagattccggaaagaccggttacatctcctgccgcataaatattcgggcagtttgtttccatggtatcagaaacctgaataaagcggtctacatgaattggagtatcaagggcacattccacggcagggcggacaccggctgcaacgatcaccaggtcgcagtcaattttcgttccatcatcaaggagaacaaaatcaattgcgccggcttcgttcatatgtgtctctgatgcttttttgccgagaagaaatttgcagccatgtgattcgaataaagttctgtacgcattgccggcggtctcattcagctggatcggaagaatgcggtctgccatctctacaacggttacatctttcccccgctctaaaaatgcgtatgcagcgtccatgccgaccaatccggaaccaactacaaggatacggttcgcctgatcagcaagagaccggattgcctgcgcatcagacaggtgacgaaggccaaagacattattagcttcccgaaactgtccgaccggaggaataaagctgtttgctccggttgcaatcagcagacggtcataggaacagcaggtgttatcattgagaacaacgacctgttctgcggtgtcgatggtgcggacagagacaccgtttctccattgaatccgataagtctcaaaaaagtccggctctacaaaggacaacgtatcctcattacgctcatgactcagatagcggtggagcatacagcgggaatgtacatgctcatccgttgaaatcattgtgatagcagcatccgggtcattttcacggattgtttttgcggcggtgataccggcagcgccgactccgataattacatgaatcataaagacacctcctcaacatagattgctttctttggacaggatttcacgcagtttggctttgcatcgtccttcatacaaaaatcacatttgacgacttttgtatgggttgcggtgtctgcttttaaaacgccgtaaggacagttcatgacacacataaagcaagagccgcattttttttcgtcgtaagagacaattcccgtttccggatctttggagagggcgccgctcatgcaggacatgacacactccggtagatcacagtgtctgcagaaaatcgggcggtaactgccgtccggcattttttcaatgtgattgcgagattcattgtgaatatccgtaaggtctaagtcatagacggttccaggggtatccctgtgtgcctgcatacaggcgacggtgcagtttttacagccgtcacagagagaggcattgatcataattcttctcatagcagcacctcctatatctgtaagccctgacgtttttctaaaatgatctgttccaaaatatcggcagaggcttttgcgtcatcgttgataatcacctgtccgccggtcagttctttcatatcctctgtcagaaccttcacggcagtcttgcttccggttacaaatggaggaagtccaaggtgaagcggaagaccgagagccaatccgaaacatccgtcagccagtgcctgctcttcaagccattgagcggcagacagaacgagcgggagctgaggaaggtcaacaccaagttctgcggcaatctctgtcgcaacaatttcaagacgtccgattgcaaggcaaggaccaaaattcaaaacaggcggaatattcagtttctgacagactgcacgcaggcgaggtccggctaattcggcagcctccggtgtcatcaggccacagttttcgattcctcctgaagaacatccggctgtcagaacaagaatatcgcgcgaaatcaattcttttgtaagttccacgcttaagacatcgtgtccgccggctgttaagtttgagcagcctacgacaccggcaattcccttaatctcacctgctgcgagcagttcaatgagaggagtccatttcccaccgaggaaggattttaaggagccttcgcttacaccggttaacgtatggtcatttccatgctcttccatcagattgagcggaacgcatcctcgtctttctttgtaagcttccacaattttatcgatgatgagatcactttgttctgcgcggtgttcaaattcaaatggcatcagttctgcatttgcttttttcgctacatcatccagacaaatctgtttgatcttcagctcgtcacagattggctcgatacccggaagtgtacagttgaattcggacaaaactgcatcaattgctccggttgcgagaattgcttcgcttgtgtagttattaccggcatgtccgtcgaatacttctgtataatgagcgccacggagttgtagatcctgtcccacacaggtacatccaaccaacttgaacccttttgcaccggctgccaaagctttcttttttgcctcttcggagatgagtttttcctgcagatcgacaaaaatcgtatgctgatgtccggtgatcatgatattgatgtaatccggatcaatgacacgaagtccgaccggagcaagacgaagttctggctgaccaagaagtacgtcattgagaaggttggtcagtgtcagtccgtatacgcctgttgaaattccaagttttagacagtcagtgagcatatcgacagggtcagagtttaagtttgtggaacatttaaccacacctttgaaaacttctgcttttgcaccgcctggcatgataccgagttctttccagcgcttgatgcgcggagcatatgcgattttttcaatcaattcagcggatacatattcaggcttatataaatcagcaagaacggagtcggcgactttctcagctttcacatagatatcctcatctgtgataccgaataattcagcaagatgatccaaagatttcaatccttttaattcaccgcggatctgagctgtttttttcaaattcaatgcggtattttcaacaatatgtatataacatccgctgccggaagcgactgctcttaaaaagtttcgggtgacgatcgtgtctgcgttggcgccgcagatacctcttggagcctccggagtgatacggcaaggcccgttagagcagagacggcaacagacaccttgaagaccaaagccacatttggtactctgaccctccacacggtgatgagaagtttccactgggagcgaacggataaatccttctaaaggtttatcggcgcttttgcaagttgtacatccataacattgattcatgataaaatcctccttttaaacttgactaaaatagtaaagattaggcctgaaaaatatgcctggcacatttttcgagtatacaaattatccgaaaaataattcagataaagatttctgacgcatctcctgcaaaagcatggattgcaggcggcagaattcccgatgtaccagacatggtttttgctgattgttcatagaacagtgatagccgtctttcatacactctaaaagcagaatgtcagggtctacggcggcacagatgtcatagagagaaatctcagataatgtccggttcagacaatatccgccatttgtgccgcggcaactttttaaaagaccctgtttttccagttttctggtaattttgtatgtcattgcagaaggaagctgctctgctgcacagatattggagacactgacaagttctccgtctgagagcgctctcataattcggatcgcataatcacattcttttgtaaacagcataaaatacatacctcctgagtcatttcgcccaatcctgttcgggttgtatttactatataatactggataaaaatggtcaagtatatagaagctacttgtaaaaaaacggtaatatagacaaaaacaggaggtgtttgtctatgttttaacaaataaaattatacaacattaacaaaacaaaccattgtgtgttacaagaatcttcgaagtggaatggttatcacacgcagtatggcatagaagatcttttttccaaaactcaaatctttggagtgatagttttcaccgtaatcatattcactgtcatttcccattgttttgctgtatgttttgtcgcgttccatttcagcttggatgatggaatttaactccgggcagtccactgcaagcatcagttcggtatcctgataggtgcttcgcatatccatattataagagccgacaatgctcatgcggtcatcaatcaaaacagcttttgtgtgacaggaatgagctcccataaattcatagacgcgggcgccggtttcccagatgtttttttctggttcagataatctgtgcatccccaaggatttgcgccgcttgccacatcatttgtgatgatctccaccggaatgttcttttcgtgaagttctgtcagatcctgatacatttcttttccgcaaataatataaggagtgtagatacgcgcctgttcgccttgcatcatgagctgatgaagagaataccacatccacggctctttgttctcggacttgattggattggagagcaaagatactttatttgtctgcagtgtgagtgcttcatagtcccatgtactgtaagcgtccggatatttttcttttagagaagtgtaccgattttctagttttgctttacagctttgaatctttttggtcatttttttgcaggtatattctttgctgtcagaaagagcccagacagattcaaaatagtcagtgagctggcggatggaggaagagtcgttttctgccgtctcatagacaaataattcacgatcaatatttttggacctggagtagtcgccgagaaataaatttgtcgtatttcttccgccgagcagatacattttctggtcgacaatgacgtatttgtcatgcatccttgcctgtaagttccaaggttttaaaagatttataggattgtaaatgcgaaccgagacgccacggtcagcagcgtgcagcagagatgccatcatatcctgccctgatttgtccgcattaaaatcaaaagtagagaggatgatttcgtcttttgcctcgtcaaacatatgtaatcggtacaataaggcatctgtgttgtcattgatatatgcaacccgttccgtaccggcagtatcactgtaaaatgactgttttgcgaactttttctgataagatacagagacattcttgtgttgaatatatggaatggcaagcagcgcaatataaattagcaaaaagagaagtaaaatctttccgattggtaagcttctgagtgaaaataagtgtttcttttccataataaaatccctcctgtatgctagtataaatcgaaatataccttttgtgttggatttgaaatattaaatttttagaaagcgagctaacttttatagggcagagtgggagcagtgagaaaaaataaattgacatttcccgatgaagaacttataatgtaggtatattgggtgtgtaactgtacggcaggcattaaccttacatgaacgttattttggatgtttttgtaggttaatgcttttttgttgcataaatacatgtaaaactccaaagtatcttcataagagccaaacgagtcaacaagaaaggggaaaagaaaggtgaaagacaagatttttggtattttacagagaatcggaagatcttttatgcttccgattgcaattcttccggtggcgggtctgctgcttggaatcggaagttcgtttacaaatgagacaacaattgccacatacggacttcagaaaatattaggagacgagacagtgctccatgcactgcttacgatcatgaataaggtcggaagtgcggtgtttgataatctgccattgatttttgcggttggtgttgcaattggaatggcaaaaaaagaaaaagaggttgcggcattatctgcattaattgcatattttgttatgaatgtggcaatcaatggtatgctggtagtaacaggggaaattacagcggatgggcagattgccaaagatgtgctggaaggaacaatcgcatctgtatgtggaatacagtctcttcagatgggtgtatttgggggtatcattgtcggacttggtgttgcggcgctccataaccgtttccacaaaatcgcacttccgaatgcattgtcattttttggaggttccagatttgttccgattatctctacaattgtatatatgtttgttggaattggtatgtattttgtgtggccaccggttcagaatggcatctatgcgcttggagggctggttacaggaagcggatatgcgggaactttgatttttggtattattaagcgtgccttgattccgtttggactgcatcatgtgttttatatgccgttttggcagacaggtgtcggcggaagtatggaagtggctggacaggttgtgcagggaggtcagaatatcttctttgcccaattggcggattcggcgaatatcgcacacttcagtgcagatgcaaccagatatttctcaggtgaatttatatttatgatctttggacttccgggcgctgcgcttgcgatgtaccgctgtgcaaaaccggaaaaaagaaaagcagcaggcggattactgctctcagcagcattggcatgtatgctgacgggtatcacagagccgttggaattttcatttttattcgtggcgccggcgttgttcgttgttcaggtcatcctggcaggttctgcgtatatggtggcgcatatgctgaatatcgcggtaggacttacattttcaggaggattccttgatttcttcctgtttggaattttacagggaaatgaaaagacaagctggatgagagtcattccggttggaattatttactttattttatactatgcgattttcacgtttatgatcaagaagttcaactttaagacaccgggacgtgaagatgacgatgcagagacaaaactgtacacaaaagcagatgtaaatgcaagaaaagaagggaatcagacgacatcaaatgaggcacatatggatccggtgagtgcacttatcacaaagggacttggtggaaaggctaatatcagtgatgtggattgctgtgcgacaagacttcgtattacagtcgaagatgcaggaaaagtaaatgaggatattttaaaacagagtggttccagaggaatcgtaaaaaaaggtcagggagtgcagatcatttatggaccacaggtgactgtgatcaaggcgaatctggaagattatctggaaacagcggatgatagcttggaagagacagaagaggtgattgagagaccttcttccgaggagaacgctgtgacagagaaaacagtcaaagacgaaggaaaagtgacagagacaatcatcatatcaagtccgattaccgggaaagcggtggaagtagcagagataccggacgaaggatttgcaggaaagatgatgggagacggtgcaggtgtgaccccgacagaggcagaaatcatggcgccggaagatggtgtggttgcatttgtatttgaaacaaaacatgcgcttggattccagacggactcaggtcttgagatgcttttgcatatcggaatcgatacggttgcactgaatggacagggatttgaagtgtttgttgaaaatggtcagagtgtgaaaaaaggagatctgttgatgaaaatagatgtctcatatctgacagagcatgcaccgtctctttgctcgccggttctttgcacagatctgaaagaaaaccagaaagtgagactgcttgccgagggtgaggtgaaagcaggagagccattgtttgcagtggattgttacgaaaaatagtgaacagtaacggaaataaaaagtttcaagcggaccggaaaggtccgcttcagactgtagacaaagtcccggacagaagtccgggtttttcttttatcaagttttccacatttctaacgtttttccatagatttaccaagaaaaatggttcggttatcaactttattttccaaggtttttcaagcacttcatgatataattagggtatcaggaggtagtgcttatgatgacgaaaaatgcagataaaaaaagagaacaaatacagatgttttgtatggatgatatggttcctcaaaaccatatgcttcgcttgatagacaaagcgattaactggaacttcatttatgaacttgttgaagaaaaatattctcctgataacggacgtccaagtatggatccagttatgctgattaaaattccttttattcagtacctttatggcataaaaagtatgcggcaaacaatcaaagaaattgaagtaaatgttgcatatcgatggtttcttggattggatatgttggatcccgtaccacatttttctacgtttggaaagaactatacacgtcgttttaaagatacagatctttttgaacagattttttcaaagattttagaagaatgcatgaaattcaaattggtggatacagaacatatttttgtggattctacacatgtgaaagcatgtgcaaatagtaaaaagatgagaaaacgggtggcacatgaacaggcattatggtacgagcaggaattaaaagaagaaattcagaaagaccgggcggcacatgggaagaaacctttgaaagataatgataaaaatgattctccaccaccaactgcaagcggaggagaaagttttgcagatgaaacagaatctcagattccggaaggagcaaaaacacaaaagtgcagcaccagcgatccggaaagtggctggtttcgtaaaggagaacataaacatgtttttgcatatgcagtagaaacagcttgtgataaacatggttggattttaggatatactgttcatcccggaaacgaacatgatagccgtacatttccgctattgtatgagaaaataaaagatttcaaaccggatatgatgataatggatgccggctataaaacgcctgccatcgcccatcttctcttggaggatggaatccaacctctttttccgtacaaacgaccaatgacgaaagaaggttttttcaaaaaatatgagtatgcctacgatgagtattatgattgttacgtctgtcctggaaaccaggttttaaaatacagtacaacaaatcgagatggatatcgtgaatataagagttgcggattgttctgtagtagttgcccatacttgcatcaatgcacagaaagtaaagatcatgtaaaagtcattaccagacatgtatgggaagaatacatggagaaagcagaagatattcgccatacaataggtaacaaagaaatatatcaacaacgaaaggaaacgattgagcgacttttcggaacagcaaaagaacaacatggtttccgttacactcaatacataggaaaagcacggatggaaatgaaagccgggcttacgtttgcgtgtatgaatttgaaaaagctggcaaaaattttagaaatcagggaatctaaaatgaaagaatctcggagttttttaagatttttattaaagcagaggctatttacagaaaagtggggctgtcgcactaagtgatatttttatatggaattataatgttgtaggggaaaatgcattgacaaacctgaaaaaaggacaatataattaaaattacatagtttgaaccaactaaccaaaacgtaatcggaaaacgagaaacagaggaaaaagcaatggaaacaaagaaagtggcaaaagaatacctgcaaaaagatattctgcggacgattttccagatgcggaaacggcaggaggatgataagcagatcaaaaaaatcatcgtattagactatgacctgaccgagtatcactggaaaacgaacattaagaaactgcaagaggaaggctttctggaaacggacagtgatgcgaagattccggcactgacagaaagcggaacggagtatgcgagacaactgcaacgggcagccgaaggctggaatcagttcttgcaaatgagtggagtcaatgaaaagacagcagacagggatggcagactcatggcgtgtgaggtatccgatccggacaaaatcgaaaatttatggaaatttatcaatgacggtggaagaagttccattccgaaaagtgtagactgccacacgctgtggaagaagttgaaaccgggaaagtatcagatgtggtattccttttacaccacagaaattggaaaagagagaaaagcagctatcgaagatatgcggtttgaaagggatggctggctgcacatagagccttgggagatttggttggaactaacggagcatccggaaaatgaggatgacaggacaatctggtatcagaacatgtatggaatctggaagaaggcagaagtaaatgatcacagcatcaaaatacctgccgcagcatttcacatagagtacgaacagcagtggttgggtgaaatacatttcacctgtaatctggggtttgtcgcagagaaaaagaaaggctccaagaaaaaaacgatatgcttactggatggaaggcttttgcagaaaataccggatatcgtgtagcggatgaatattaaaaaagacaggtaggaaaggtaacatggaaagaaagattgaaaacagaaatattgatgtaacaaaagccagaggcgaactggaagaagatcttctggaatatgtctaccggatgtggaggcaaggcagacagatcacatcgaaagagtatgccagagaagtgaatataaccggatatgaagcggcaggcctggtgcggagtctggtgaaaaaaggatttttgtgcgagccggaaaacggacatctggaactgagcgataagggaaaactggaaggtatggagtgccttgcacgccatgagaaactgacacagttcttccagatggtaagtggaatggatcagcagagggcgcaggaagatgcctgtagagtggaacattatatcagtccggaagggttaaaaggaattgaaaactttctgcagtacggtgacgtatacgacagagtttatgacgatatggacttgtataccttttatgaggatggtgagttcccgatggcattcggactgtatgaaccggaacgacgcaatccaagattccttgcaccagagtacgggaaactggaacattctgttatattaagagtgaaaaagtcccagaactgcttcctgctcaggacaaaaaaggacgaatccatcggctatgtatggtacagaagagaggatgaatggatacaggcgaaagaagaaaaaggtgtttatcagttaccgacagacatctgtacttatactgccaatacaggaatcccgattacagaagcagtggcaatcattgcgattacacgctttgatcagaagccattgccaatcgattatcgggaattgaatattcatgtatggtgacgaagagaggaacaagaaaatggaaaaaggtgaacatctaaagagacagaacagacctacaatgctgcaactgcaatatttacaacgcctgtcaaaagtagaaaagaaacgtggagctcagggaagtatcgcagaatattatagcgtgaaccgttcaacggtgaaccgctattttaagagctgcatagaaagaggaattctgacagaatcactggaatttactcctgcaggagaagaatggctggaacgatattccaacctgtatgagaatcttgaaaaatatctggaagaaatcggtgcaaaaccggaagaaatcgaggaatcactggatgttatggtggagaatatcgacatccacatgctggaactgatgatcaatgcctatgcagagaaaaaatcagtatataagaaaaaagagaatgaactggatcaggagatacagtacaatctgcagaaatgtaaaaggcatccggtagtgttccggctttaccggatgaataaaaagcaggggcagggaagagactctatggcgatgagaggatttgaagaaatagccgaaatcgttcaggagaatggagaaagctatctggaattaaagttgaaagagatggctgcacactccagagtgagtggtgaaatgatggctggaaaactgaaaacattgaagtatgagcataatgaagttcttgaagaagcaagaatagagaataatatagtgaaaatcccgatggaagcgtgcagaatccaccgatggacggggattggcacgatgggaattgtaccagttaccgttacctgcagtgtaggaccaatgcacatgccggaaagcactgcactgttatatttctgggtataaataagaagtgagaaaaattctcatttacgcatatcatgtaacaaaataagaaaaaatttcaataaagtgccgttgttgataaaacactatcaataacggcacttttacgtctattgttgtctgaatagcaacaaaatcaaagaaaataacggcttatttgttgcaattcaggcaacaaacttgtaaaaaatggtgttgacattggatggcaaattatggtatctttcagacaagaagttagatacgagtaaccggaaatattctcgtagaactctaaacatcataactaaaaatttattagcaaaaagctaatgccaaaaaacgaaaaggaggattacagttatgagaaagatcaagaaattagttgctacactgttagcagcaacaatggtactggcaatgggagttacagcatttgcggctgaaaatgactctacagcattagcggcaggaacatatactgctaatctgaatctttacaaagatgcagagtgcaccaatccatcaatgggtgatgcagcagttaatgacatgtgggctgacattactataaatgctaatggaaaagcaacactggttgttcatacacatgaaattaaatatttaggacttacaggtcatttgggaaaaatggaaatcaatggaacagctaaagagcctgttaaagacagctcaggtgacgtagtagattattattttacattcacagatttagatgcttcaatgttttatgagggttgcgtgattactggaaagttcacaacatacgtaggaattatgccgatgagtgcaactggatatctgaaacttacaggaattgaataattgacataattatttaggagaggctgctgtacaattggtgcagcagcctttttgagaatggagacaatatgaaaataataaaaaaattattagcgtttactctaagtgcaagtatggtgctcggggcgtctggactagatgcgtttgcaaaaacggaagaagatgtatcaaagacagaaacgaatacatctggcatagaagcgaataaatcttatcttgtaccattgacgttttatgatgtgactggagaatcaattcgagattatggaggactcggaggaattccagagtttatagataatgttgcgattgttagtaaaaatagcgatgatacttatcatgtaacgctccagatagaaaactacaataaaatagatgtattacaattttcaaaaccaggggttatatctgatgaaacagaaccgaggaatgctctttttggaacgtataatttaccagaatcgtatatttttgaaaaagatacagcagaagatgtcagaacagctatagacagatacataagtgaagagtggaatgaaaaatatatccagaatgtggatgtacagacagcagatacaggagtttcatggtattcatttgatgttgatagtttggaaaaatcaatttatgtaaagagttttcgcagctatggatataaaagggtaggaaaaaaatatacgtatgcttcgggaatagactcaggaaaatttacatttgatttaagtcaagcagaaacggtaaatgaattgagcgattctagttataaaaatgcaggtcttgaaatttcaaaagtttcaacaacagcaggagaaccggtaaatttttatgcgtttcctgtagaagggaatgaagtaaatgattatttcgctggaacgaatgacattagtgtcgataatcagaaaatggaagtttcaacagaacttaaaaatgcggataacattgcatcagttcaggtacttaatgggataaatgatttaggagataaatcaacttctactacagagaatacaaactttttacagtataaatatgcatattcggctgaacaagtaggagataaaacaatttctgtttattcagacaatattttaagtgatggaaaaatttctcttacattttctaacttacaggaggctgtattcggtaaacaaattaaagttcaaacaaccgatggaaaaacctattatggagaggcaagaataaaaagcaatgccaagaaagatttacgtttaaccgactgtggtgtaaccgtaataacagacagctacaatgtaggtagtgataatccggaatttaaagcagagttactggaagagaatacagatgaagatagtgaatataataaatatttttcacttttagcaggaagttcatcaaaggctttgatttataatttgggaataaatgtaaatggaacaactgttaaaccgacaagagcggtagaacttagagttaagataccagaggactgggacacaagtaaaattgaagttcaatggtatgatgctccggtataccagatatttaatccgattgaaaactttggaaattcttcttataaaaatgaagatggtagtatccggatggatggtgatgagttagttataacaggaactacttgcgtatataatacattggcaatttcagaaaaatcagataagacagacatttctgaaataaaagacggagtttataatgttaatgttactatgtggcaacaggctcagccggatagattatctatgagtaattcggcggttgttaatgattctgcacgcttagtagttgaaaatggaaagaaacatatctattttgatacgcagggaattacaatcgctggtcgttatggatatagcaatggaatattctgggcaaataatgaacagacagaagaaaatggacttccagtattaggtgaatatacaccacttgattattacagttattatctgaatgattcgggtagcacagatatggattcttatgcagaacagtatgatctgtattatccaaagacagttggatttgagttcccggaatcagcggacagagatgatggggtatatctgaacttctttgtccctatcatggatgaacttcagaataaagttcctggatctggtgaaggatgcagaacggcatttatgactttatctggtttaacacctgtagcggaaattaacgagccaacccacgataaatctgttttagttgtagcagttgataaagcatctaaatatacagccgacaattatacagaggaatcttacaaagtattatctgacgcagtagcaaaagctcagaaggtaatcgacggaacaacttctgcaaacgattcggaaatcgtagcattagataaagaaatttctgatgcaatcagcggattaaaagaggcaactggacttgacaaatacaataaagttctgaaaaatgccaaggcattaaatgaagcagaatatacagcagaaagctgggcagaccttcaggcagtgatcgctgatcaggaaggaaaggtaacagaagcaaatgcagatcaggcatccgcagaccttcagtcagcagtagatgcacttgtaccgatgtcaacagccgtttccatggaaaaaggtgtttacgaagtacaggcaacacttaccaatcaggatggaacagcaagtgatttgaatgcaggattaaaatctgctcgtttatatacagataaagacggcaatgtaactgcttatctgtacgtggacggaattaccggtatgcagtatcgcaagggtgccggatatgcgaatgcagatacagacgcaggcagacttgtagttgcgcttcctgcaaatgtagaaaaccacaaagtaaaagtaacaacagaaagcggagaaacagaactcctgttaaatcttgatttaaaatctgcagtaaaacaggaaattaaaaaatctgatctggaatcaaaactgaatgatgcaaaagcattagaagagaaaaattacacaagcgattcttttgcagcattaacagatgcgattgctacagcagaaagcgttcaggcagataaggtggcattccagtcagaaatcacagcagcagagacagctctggatacagcaacggcaggtcttgtaatgaaagaagaagtaaaagcaagagcagaactggatcaggcagtttccgatgcgaaaaataattatgcagaagcaaattatacaaaagacagctatgagaatctgaagtctgcaatcaaggaagctgaagaagtattagcaaaatctgatgcgacagcagatgaaatgaaagaacaggctgaaaaactggataaagcagtgaaagcacttgttcgtctggatgatgtagtagataagtcagaattaaatggctatatcgaagatgcactgaccaagacaaatgacggcacttatacagacaacagttggaacagtttccaggcagcaatcaaatctgctcagaaagtatccgctgatgtcaatgcaacaaaagcagaagtagaaaagcagacaaaactgctgacctcttcttatgaagcacttgttgttaagaacaagcagagtaatctttttgaaaaatatccgcagatttttgaaggtacatattccgtaccgatcaaactgctcaacgcaacatccgatgaaaattctatgggaaatgcttccatggttcagaccggaattgtaagagttacgggtaaaggtgaagtaacactggagatgaacttccagtctatgcagtttgccggagagacaggctatctgtacaaactgaaaaaagtcgatatggatacggttgaatacaacaaatataattatccggtaaaatatgaggcttctgatgcgacaactctggaagagtacacggacgtttatgatttatttaatgataagaactctaaatattatgacaagaataccgaaggaaactggtatccgaagaaattatcaatcccgattgaactgaacgacaacctgttctatgtagaggtttatgttccggttatggaaagcattgctgaaggtcagggtacaaaagttgccagagtttctatcgactgggcaaatatcaaacaggagacaggcgttgagagagataacagtgtgatcaaagcacttctggatcaggtgaaggctatgtctaagggcaatgttgctgatgaatactggaatgctttaaatgcagcttatatgacagcacaggatgtgtataacgacatgaattctactcagaaagaaattgattttcaggtgaaagctttacaggcagccgtagacgcagtagaaactcaggttgtagacaagacagaactgaatgcattgattgaaaaagcaacagcagaagcaaaccgtacagaggttgtttatacttctgcaacacttgaagcattaaaaacagcgatcacaaatgcacaggcagtggcagcaaaagaagatgctaccaaggcagaagttcaggcacaggtaacagcactccagacagcactggatggtttgagagctgtagataagacgaatctgaatgacttgattgcaaaagcaaaagcggaagcagcaaaaacagatgtttacgaaagcaacagtctgatagtcctgaatacagcaattacactggctgagaatgttgtagcaaatccaaaagcaacagagtcagaagttgcagcagcagagaaatccctgacaactgctttaaatggactggtagaaaaagaagttgtagataagagcaaactggaaagtaagattgcagaagcaaaaacatttgtaagtcagacagacgtttacacagaaagctctcttgcaacattgcagagtgcaattaatcgtgcacagaatgtcatggataatgattcagcatcacagaaacttgtagatgaacaggtgacgaaactgacagaagcaatccagcagttagcaaagaaaaatgatggaaaactggatatcaagaatcttacagatggtgtttactccgtttacggtacaatggtcaaagtagacaagaatacatattctatgtcaaatgaggcgattaaccataccatcaaactgacagtgaagaatggcaaatattatatcaccctgaacttcaatggtctgaccgtaggacagaaacttggatatttaagccagctgaaatacttcacaacaggttatactgttgacaagtacggtaatccgcagggaacactggcagatgtgacaatcgaatcttgtcagaagaatgcagatggaacgttagtatctgattcttatggaacaaactatccagatgtcgttacattcgaattgattccggaagctctgaatgatggatatgtgccattacaggtattcgttccaatcatggatgcaatcagttccggtacaggaactcagccagtattcctgaaactggatttgaactcactgaaagcgaccacatccgacaatccggactttaataagaacgacaacaacaataacaacaacaataacaacaacaataattccaacggaaataacaataatggctcttcgattggaaatggttcacttggaaataataccctcggaaacaattctcttggaagcagcaaacttggttcttcctcacttggaagtggttcttcaagtctgaagagtggaacatccagccttggaaatggtacaggttccagcctcaagggtgcatccagtgttaagacagatgatgtcgtagcaaacaatacactttgggcagcactccttctgctcggtggagtagcacttcttgccggactgatggagtacaagagaagaaaagttacaaagtaaacgttataaagaaaaagcttaagaatggcttcctgatctgacaggcagttcgtaagcagacaggtaactgttcagagccgggcagacggaatcttaacagttacgcagaaagaaaatggaagtctctgctacataagtggcagggacttctctagtataacaggagaaaataagatgaaattagcaaagataaagaacagaatcaagtctgtggtgatggcttcggcacttagccttgccctgctggctggttttccgccagtggaggcgcaggcggctacaggaagtgtctatacctgtaccatcaaccggtgctatgcacatccggtaactggagtagtggaagattccggcggggcaggctcttacgccacaggacaaggaatggtagaaggatgcgtgtatccgactggtattttagaggtggcagatgatggaaattattatctgacgatccgtctgagtctgatggattataccagtggacatgattttcaggtacagagtgtcggtgactccggctggtcaagtactgggtatgcacagacaggtacaggttctgacagtaacggaacgacagccgatgtcgtaattcaggtgccaagtgaaaattgtatcgtgcgtggaacgatgtatgtagaaccaatgggaagaaatgttgtattctatctctacccaagtgattacaaggaaggtaataacactgatatgaatgcaacgatggtaactggaagtgcagcaagtaacggaacagcagcagagagttcttccaatggagggtcggcagtatctggttcttcaggcagcataagctctggaaattcttctctccagagttcaggaagtacttcatccgacagttccacaggcagtgcgtcatccggtaagaaattacagagcagtatatcagaagcagcaaagccaagcagtgaatcggaaactccgagtacggacagcagtacactggacagtgcagaaggattaagtctttctaccgcaaaggatgcagatgcagcagacagtgacagtacttccacatcgacttcaggaaacaaggtatttcagatcgcaattgcggttctggtggtcggtctgatcctgatcggtgttgtggctgctgtggtattctatttccgtaagaattggagacgctggggaggtggacaggacgatgatgaatagaagattaaagaaagcatccgcagtcctgcttgcgatgaccatgctcttttcccttgccggatgtgtcgatcagagtcagggaaaggaaagcagtgactccgggacaaagaccgagagcagtgcggatacttcttcggaatccgcagagtcgttattgaagattacagatccgaaggaaaaggctgcggtgaaagcagcgaagaagaaggtgcaggagctggatggagagccgaggatcattgcgacctccccggcaaccgcagatatctgtgacaagctggaactggatctggtgggtgtatgcagcagtaccgtatccaccatcccggacagatacaaggatgtagagacggtcggaacagccatgagtcctgacaccgagatcctttcatccttaaaaccggactggatcttaagcccggtatccttacagagtgacctgcagccgaagtatgaagccatcggttctgactgggcattcttaaacctcagaagtgtaccgggtatgtaccgttccattcaggagctgggtgagatcttcgaccggcaggatcaggcagataagcttgtgaaggaatttaccgagttttatgatgactataagaagaaaaacgaaggcaaggaccatccgaaggtgatgatcctgatgggacttccgggaagttatatcattgccactccgaactcctatgtgggaagtctggtggaactggcaggcggtgagaatgtgtattctgacaccgatcaggaatttctgaccgtcaacacagaagatatgaagaccaaagagccggatatcatcctgcgtgcagcccatgcactgccggatcaggtcgtggagatgttcaataaggactttgccgagaatgacatctggcagcattttgatgcagtgaagaatggccgagtttatgacttgacgtatgaatactttggcatgagtgcaacgtttaaatatccacaggcactggaagagttacagccgatcctgtacccggagagtgatgaagatacacagaaagcaaaagaagccagtgataatgcacagaagaaagccaaggattctgacgcaactgagaaatacaacgaacagcagagcaagtagaaaggagaggacagatgaaagagacagaattacagaatacttctgagacttctaaagccgaagtccagaacctctccgcacaggataaagcaaggaaacatcgaaaaacagcaaaagcagccatttcttttatcgtgatgatcttgctgcttgtggcattattctttgcggcagtgaacatcggaagcctgaaggtcagcttcccggaactgctgaaaggtttgtttgtagaatacaatgaagatgtggcaacgatctatgacctgcggttcccacgaatcgttatctccatgttagccggagcagcgattgcggtatcgggggtgttatttcaggcagtacttaagaacccacttgccgatccggggatcatcggtatctccagtggggcgagctttgcggcagtactgatcaccgcatttgcaccgactttatttttcttcactccattatttgcatttcttggcggtgtgattgcatttgtcttagtttacagcctgtcatggaaagggggattaagtcctctgagaatcatccttgtcggtgtggcagtcgatgcaatgttcaccggattatccagtgcgttaaattctatgaacggtgggaatatgtccggtgtggcagccattgtcaatggaaatatcactatgaagacatgggatgacgtgaagaccttagtaccatatgtcgtgatcggactggtactggcgctggtcatgacaaagatgtgtaatctgctggcactggaagataagacagcacgaagcctgggaatcaatgtcaatgcaatgcgtatcgtgatttcactgatagcagtattacttgcaagtatttccaccgcagtagctggagtgatcagctttttaggactgattgttccacatatcggaagaatcctggtaggaagtgaccataaggcattagtaccatttagtgctttgttcggagcgtttacattcctactggcagataccatcggaagaacgatagctgctccgtatgaagtatccgcatccatcattatgagtgtggtcggaggaccattcttcatcatactgttaaggaggtctaagaagtatgcaaagtaaagaaaagaatatggatttgacttctacagagaatgaagcagcaaagaaagcgaaaaaagcggataagtgggcagacaagcctgcgatggaagtcagagacctgcactttgcctatggcaaaaataaagtgttaaaaggtgtatccttaaagatcgaggaaggcaagatcacaaccatcatgggagcgaacggatgtggaaaatccaccctgttctccctgatgacgaagaacttatatccggggaaaggaaatatcttcctcaagggaaagaatatccagaacctgaacttaaaagaatttgcccgaaaggtagccatcgtccagcagtataacagtgcatcggatgatatcactgttgagaatctggtagcattcggaagaacccctcataaaaagatgatgcagggagacagtgccgaggatgagcgcatgatcgagtgggcgctggaagtcacgaacctgatggagtaccgggacagagaagtatcaagactttccggaggacagcgccagagggtatggatcgcaatggcactttgtcagggaacgaagacgttgtttcttgatgagccgacaacctatctggatatccggtatcagatcgagatcctgcagcttgtaaaaaaactcaatcaggaatttggcattaccattattatggtactgcatgacatcaaccaggcaatcgcatattcagataatgtcatcggaatgaaagatggaaaagtgctggtggaaggtgatccggaggaagtgattacggaagagagcatccgggagctgtatggcatcgagcttggcgtgacgagagtagacggacggaagtttgtgctggcggtgtgattttagttactgttcactcccgtgtcaatcactccgctgattgacacggaggatgcgtgttttgacttgaatgcatatcgccccattgccaaaggcgattaaaaatggcgagatgcgttgctggtcgcacatcgtgtgaacagtaactgattttagtataagatgtttgataattgaatagatgtttgacatagaatgaaagcggtgttaatatgatattagaaaaggtgctaccgatgacggttcgcctgatgaaaaaaagatggtaaaaataaccgctctcagtttcctaggctaaggggcggttatttttgtgccttggaatcacgcttcccatgagcgtaacccagactgtaaaaagtcgcatacagtgaaatcactgcgatttagtcactgatggtcagcataagcacatacctcctttcataagaattccctcaaaaagagagatagatctatgtaatcggagctatatactctccgcacaaagcgaaccgccatttcacgtcaagtgaagtagcaccttaggctgaaaagcctgtgtctattctatcaaatccctaacgattacacaatgtgtaaaataataaaattaacgcaaatgaattaatgaaaggaaagaagatgaaaaatccattaaaaatagtctggatcgtgcttggatttctttgtctgggacttggtacgataggaattgtacttcctatcctgccaactgttccgttttacatggcaacgctgttctgctttgccaagagttcaaagaaactgcatgattggttcataggaacgaatttatataagaaacatctggacagcttcgtccagaaaagagccatgacgatgggaacaaagtgcaagatcgtaggaactgtgaccgtagttatggcgatcggatttatctgcatgaaggatgtgccggttggaagaatctgtctggcagtggtgtgggtgtttcacattatgtatttcttcttaagggtaaagacagtaaaaacgggagaaatggaagtggaataaaagatttttgacagacaatagaataagatgtttgacatagaaaagaagcggtgttaatataatagtagaaaaggtgctaccgatgacggttcgcctgatatattatttggtataaaaataaccgcttaacttaccaggttggggcggttatttttgtgccttggaatcacgcttaccatgagcgtaacccagactgtaaaaagtcgcacacagtgagatcactgcaattaagtcaccaatggtcagcataagcacatacctcctttcataagatttctctcaaaaaaagagatgaatctatgtaatcggagctatgttatactctccgcacaaagcgaaccgccatttcacgtcaagtgaagtagcaccttaggctgtaaagcctgcaatcattctatcaaacatttgttctaaacgcaaggtgtgttatctaaaattgtaaaattccactaataaagaaatgaataaaaagaacaaagtagaaaaaaagcggcagaaagaacagtatgtcgtggaagagatgatccggctgtactgccggaagaatcataaggaacatgacaaaacgacaggaaagatgtgtccttcctgtcaggaactttcagattatgccagactcagaagccagaaatgtccatttatggaagaaaaaacattctgtgcgaactgtaaggtgcattgctataagccagagatgagggagaagatccggaaggtcatgcggttttccggaccgaggatgcttttctatcatccggtgctggcagtgtggcatctggtctgtagtgtgaaagaaaaatagtgagtaggtaaaaagcaaatgattaaaacaagactggtgggacttttatcccacgcaaaaaagtacattgtctacaccatcctgtggcagtgggtggcattgctctcacaggtgctggcggtatttacgattgccgacctgttggagcgcgtggtctatcgtgcggtgacagtaccggtgattgagaggacaatcctgatcctcgttctggtggtgatcatacgatttgtatgcgaacggatgggggcaaggtcttcgtatcttgcatgtgtagatgtaaagagaattttaagagaaaagatttatgacaagatgttgaaactgggagcttcctacagtgagcaggtgtcttcttctgaggtggtacaggtttcgacagagggtgttgagcagttggaaacgtattttggaaaataccttccgcagttgttctacagcctgatcgcaccactgaccttatttctcattctttgcagagtgagtgtaaaggcaagtgtgatcctgttgatctgtgtgccactgattccaatctcgatcgttgtggtacagaagatcgcaaagaaacttttgaacaaatattggagtatctataccgggctgggtgattcgttccttgagaatctgcagggactgacgacgctgaagatctatcaggcagatcagcagaaagcggacgagatggatggggaatcccagaacttccgcaggatcaccatgaaggtactgaccatgcagctcaattccacaagtgtgatggacattgtggcgtatggtggtgcagcgattggtatggcagttgcggtgtccgaattcttaaaaggaaatatcagtgtggcaggaacgttatgtatcgtcctgcttgccagcgagtttttcctgccgcttcgactgcttggttcattcttccatatcgcaatgaatggaatggcagcgagtgacaagatctttaagatcttggatctgccggaaccacaggcgggagaaaaatgtctgccggatggagcattggatgtgtcgttgaaggatgttcatttttcttacgaagcggaccgagagattttaaaaggcatcaacttaaatcttccggcaggaagttttgtatcattggttggtgaatccggatgtggtaagagtacgattgcaggaatccttgcagcaaagaaccggggatacagcggagagatcaccatcggtggtgtaccgctgaatgaagtgaatgaaacaaatctgatgcagagggttgttctggtccgccataacagttatctgttcaaaggcacagtagaagaaaacctgaagatggcaaaaccggatgcgacgaaagaagagatggaagcagttcttcagaaagtcaatctcttaggcttcttacagacgcaggatggattgcagacacagttgctggaaaaagcaagcaacttgtccggtggccagtgccagagactggtgattgccagagcattgcttcggacagacagtgcagtttatattttcgatgaagcggcatctaatattgatgtggaaagtgaagaactgatcatgaatgtgattcacgaactggcaaagacaaagacggtgcttctgatttcccacagactggcaaatgtcgtgaagtccgacaagatttatttcttaaaagacggggaaatcaaggaaagtggaaaacatgacgaactgatgagccagaatggtgcatacagacatctgtatgaaagccagatggctctagaaaattatggaaaagggggagtggcataatgagtgaacatacaaatacaacaaaacgcagaagtgccattcagatcatgggaagcctgatcgggttagtaaaacccctgcttcatatcatgttggcagcaattatccttggaacattgggttacttgtgtgcgatcttcctgacaatactggcaggacaggtcatcgtgcatggacttctgaccggggtagccggaatgaccgttccggtagagaagatgtggttagtatttaccccggtaaagacgattatcacagtcatgatcgtgatcgcagtgctccggggaatcctgcattatgtggaacagtattgtaaccattttattgcgtttaaactgttggcgatcattcgtcataaagtgtttgcttccttaagaaagctctgcccggcgaaactggaaggcagagacaagggaaatctgatctctattattacaacagatattgaattactggaagtgttctatgcacataccatttccccgattgcgatcgcaacactgacctcgattatcatggtaatctttatcggaagatatcactggttagcaggactgcttgcactgacagcttatctgattgtcggtgtagccatcccaatgtggaatggaaaacgtggcagccagaagggaatggagtttagaacaagcttcggagaactgaacagttttgttctggattccttacgtggattagatgaaaccatccagtacggacagggtgaaaagagaaaaaagcagatgacagggcaatccaagaaccttgccgaaatgcaggaatcattaagcaaaatggaaggctcacagcgttcatttacgaacatggttatcctgcttgcatcctttggaatgctggcactgacgatctggctctatgcgaagggcgagatgggatttgaaggaatcttaacctgtacgatcgcaatgatgggttctttcggcccggtagtagcattgtcaagcctttccaacaacctgaaccagacactggcaagcggtgagcgtgttctttctttattagaagagacaccacttgtggaagaaataccgggggatgtggatacagaagaaagtacagatcatacctttacaggggcaaaagcagagaatgtaacttttgcctataaggtgagtgaaacagagacagatacgattctggatcattattcccttaccttacagccgggacagatcaccggcattcatggggcaagtggttccggtaagtccacacttctgaaactgctgatgcgtttctgggatgtgcagaaaggaagtgtgtcggtagatggtgcggatgtccgaaagattccgacaaagcatctaagagatatggagtcttacgtaacgcaggaaacacacctgttccatgacagtatcgccaataatatcgccattgccaaaccgggagcaacgagggaagagattatggaagcggcaaagaaagcttctattcatgactttatcatgacacttccgaaaggctatgatacagaagttggagaactgggagatacgttatctggcggtgagaaacagagaatcggaattgcaagagcatttttgcatgatgcagagatgatcctgctggatgaaccaacttcgaatctggattcgttgaacgagggtattatcttaaaatcattgaaagaatcagctgagaaaaaaacggttgtcctggtatcccacagagtatccacaatgaatgtagcagatgtagtgtatgaaatggagaacggcagaatttcttaacagcaggaatacagaagaaatactttccgaaaggggaggtagtatgaaactcggagaattttcggaaacagcgaatcgtgatgcgtgccggatggaacatgcaattagtgaagagtcctatctgaaaattcagtagttggtgaaaagtgataatggagtgttgggaaagttaatatgggaagtcagacagtatagcagagcaccaattattgttgtaataccgggaagccatgtggtaaagaaatacatcgactggggtgcggatctggtgctttgtacgcagactgcggaaaaaactggagaaatccgatccagaaacagccaagctgattcagagtatccggaaggtgggatactatctggatatagattaacattagatggaatataataaaggtgtattatgggatggtgaaagccatccttttttgacaaacataaaaattctatgaaatctataaaaatataataaaacagcgtcagtttttcgaatctcaagtgtttattatatgtagaagtatcagcaaaacacaacgtataaagtgatacaggtgggaattcattttgtatgttgtgagaggagtgagaaacatgttaaaactgggagtctgtgatgacgataaggctgtatgcgaatggttgagacagaaattgctatactatggggaaacgtgtggcgagtcgctggagatttattgctatctttcagaaaatgccttgctggaaacattggaagaaaatcaattcgatataatctttttggacattcagttagaaaaaagcaatggaatacagataggggaagagattcgcaaaaaacagcatggcagaacgatacggatcacctatatttccacctttcgggagtatgcaatgcagctttttcatatccatccatttgattttctgatcaaacctttgaaagaagaggatgtatatcatgtgatggatgaactgtgtgcctgtacagattccgaaagacagatcttcgagtatcggaattcggaaggaatgcaccggatcgcataccgggaaattatgtatttttacagtacggaaaagaccatccatatggttacagaacagggagaaaacgaattccgggggcagatcagtgatgtagaaaagagaaccggagactatttcctgaaaattcataagtcatttctaatcaaccgggcatatgtggaatgttacagatacgatatggtcagaatgaagaaccagacggaattgagtatcagtaaagtgaaccgaaagcgagtccgggggttcctgctcagacagggggaactgcgatgaacatccatctgcttacctatcttacaaaccgcatcttctggttttacacagtatatcgttataattcagctttgtatgtaaaagaaaaaaatccgcacagatggctctgttatgtcttcagttatgtgattggctgttgtgcaaatatgtgtctgggtacgatcaaagggaatgtaatatttaatcttctggggttagttttgattgcacaaagctatccggcagatacgaaacacaggatttggaatatattgatggtatatatgacaggcattttgtgcgatgcaattccaattgccatgtgcatcaaccgtgtaaagaaccgtcatcttggaccgggactgattgtaataggcaattttctgttctttgttgtagaaagcctgatggaacgaaaactgaatttaaagcgtggttatcagattaaaaccaaccactggcttgtgatgctgtcggtgcctgttttgagtattgctgtctgtatcagtatcatgaatccagaggaacatcgcatccgggaaagtatggtattgtttcttctgtttatcaatattctgattttttatctgtatgatgaagtgcagaaaagctatgaggaagaaacgaattgcagatatatggaaatccagttacagcagtatgcgaaacgtatggatgtgatgcagaattcgcaggagcgattgaacaaactgcggcacgattacaaacaccatatgcataccattcgggcgatggcacaggcgaaagactttcagggaatactccggtatgtggatcagatagaaaacgtatggaaagatacagtccccatttcgtatacggaaaataagatcgtagataatctgctgaattatatcctacaagaatacaggcatcaattgaagaaactggagatcagcgtgcatctgccaccctatatcggggcagaactgtttgatctgagtattgtaattgggaatcttttggataatgcgattcgtggtgcaatggaatccaaggaacggagtctgaattgtatcattcattatgaaaaagggatactgcggatgcaggtaaaaaacagcgcaaaagagaaagtacttcggaaaggtgaacggtatctgagtaccaagaaaaagaaagaaggacatggcatcggactcgaaaatgtgagatatgttgtggaaaagcatcagggagatatggagatcatatctacggatcatgagtttcagatccggcttttcctgtatatggatctgggagaatagaaaaacaagctgtttccgaaaaaggtcatttttgccagattcaaggtcaattccgccaaacgcaaaaaagctgtcactttttagcttatagtaagaaaaacgaaaagagggagggtagagattccgacaactgaatagggaacaaaagaaaagttaagaaaaagtgacagggagaaagagactatgaagagatttcgaaagtcggctatagccttagtacttgcagtcctgatggcgctgcagggaacagaacctatttttgtacaggctaaagaagccattgaggatgtacagaagaatgcagatttctccagaccagaggctttgacggaagaagaagcagggattacagattccacatctggagaacaagataagagtcaacagtctgatgcggacgtacaaaatgaaacgacgccatcagaagatacagagacgcaggaagaacagacaactccagcggaagaaacagaagaaaatccgcaggaaaaagaagtggaactaaaagaaccacaggattattatccgattccggaagaaccggaaggagaactgatcgattatgatgccatctccaggacgtataagactggggacaagcagtatacaaccgtttatggtggttatgtcggaacttataagaatgaggatggagataccgagctggttgataatatacacttgtaaaaccagaagaagcagatactccggcatccgaagaagcacaggaagccagcagtgcatcgaaggatgaccaaaaggaagagaaaacggaagtttatcagaacaaggcaaatgattatgccatccttcttccagaacagatgtcagaagagaatggtgtaacgattgaaaatggaaagaccagaatcggaatcattccggtagatggagattatacacattccgttattaaagacaatgcaatcctttataatgaagtttacgaaggtgcagatgttcagtatacagtactggattccagtattaaagaagatatcgtgcttcagcagccaacagacagggaagtctatgaatacgagctgcagattccggggtatcaggcagaagtaaaagacaatcaggtctatatctatccggaagggaagacaatcaaagatgcgaagtatcttctggagacgccatcaatggaagacgctgccggggagattagtttcctgatcactctggaacttcgggaagaagagggaaaaacaatcctgaccgtaaaaccagacagggattggctttcagcagaagaacgtcagtatccggtcaggattgatccgacaccagtggagatccagaagagttcctttaacatgatcggtgtggaagagggaagtcctaccagtcagattggtgacaacaattatccatatgtcggatttgatgatggtattaagtctggaaaccttgcaggatttggtactgcacatcagaactgccggacttatatcaaagtcaattctgattttagtcagattccgaaagattcaaaaatcgacagcgcaacctttgcagtgagccagcggacagcatatagtggtggcacatcgcagtttggtctttaccgtgtggatcaaacctggaacacatcgattacatggaaaacaaaaccagtgcagcttacattccaggatgtacagaatgcaagtaccacaaggaacagttatatcaattatgacgtcaaagatctggtaaatgactgggtgcagggaacgcatgcgaataacggatttgcactggtagcaatcgcagaggcaaataaccttggagcttctatgcagtgtgaggtactgaataacagggcatccgtttatggaccgaaactcagcatccagtggtcaccggctgaagatccatatctgcgagatatgtcactggatgaaacaacgatcctgcttcgcccgatgacagaaaagaataccaatggaaaactgaaatttgatgccgtatttgcagacggaatcgcaaagagcaaatctaccgtagagtattatctgctcccggatgaggaaaaagaagagcatcacgaaacagatgcgaaaccattgtattcctatccagacagtacagaatacaataagcagttcccggaggcgaataagtattacagcaaagattccaactggcagagtgcactgtattcggggctgacgaaagacaagctttataagatcaaagcaaaagcatcgaaagagattgatggaaagctggaaacaggaaaagaagtgaccagtgacagctttgtgatctatgaagtcaaacagtttgatacatttccaaagatcgcaaaatattatggtgttccgcttaagaacattatgaaagacaatcaggtgatggatgcactggttgttgcaaataatacgatctttatccgtaacccacagaccaatgtcccatatagtccggcacctcttacggatcaggataagatgcggattgacggagcattgatgggaagagggctgcactgtgaatttggatttgagccggtcaacttaaataccggtaacttctacatggatcagtccgatgtgacgatgaatgagctgaatggggaattctccattacaagaagctacaattccaaaggaacagaccagcattccatgttcggacgtggatggagctttaactatgaccagtcactttctcagatggaggacggaagccttctgtatatgagaggggacggaagttatctgatttttgataagaatgaagatggaagctataccgctccggatggttatgtatacgatttaaaagcagtcagctataaagatacagaccatgattacatcggatgggaactgacagatgcggatcagagtatctggtcatttgataaatacggaatcttacgatatgtaacggatgtgaatggatttaagacagtattagattatgacgatgattataatctgagcaagattaccacaccatccggaaaaacattcggggtaaagcaggataaattcgggcatatcaaagaactgtctcttccagatggtggaaaagttacttacaaatatgatgagcagggaaatctgatatctgtaacagacccgaacggaacaacaaaagagtaccaatatgatgatgacagccgtatgacaagctggaaagatgagaatggcaatacggttgtaaagaatacttacgataaagaaggaagagtcgtagagcagaccgatgcagaaaaaggaacagcaacttttaagtacggaaagaattctactacaacaacggataacgaaggaaataagaccgtttatcattatgatgatcagtaccgtacaacatccattgaatatccggatggaacaacctgtgaaaagacttataatgcagaaaatcagcttgcttccgaaaccacagcagcaggaacaaaatcttatacgtatgatgcatttggcaatgtagcaacggagacaagagaggatggaaagacagcatcctacacatataacgaccagaataagctgaccagcgtaaccggatataacggagcaacggttacttacagttatgacggtaatggaaatatggtcacatctacaaaaccggatggaacagccattacctatacttacgatgacaaacatcgtatggtatcccagacagacggcagaggtgtcacaacaacgtattcgtatgacggaccgaacatgaccggatatgtggatggaaatggagcagcatggggattcacgtatgacgcgatgaatcgtgcagttaccatgacagatccacttggaaatgtaacctcgaacagttacgatgcgaatggcaatctgacttccaagacagcagccgatggcggtgtgactgcttatacgctggatggtgtgggaaatattacagcaagtactgacgcactggggaacaccaccacttatacttacgataagatgtacaacatgaccagtggtacagatccgaaaggaaatcagatcagctacgcttatgataagaattatcagcaggtcaaagcaaccgatgcaaaaggaaatacaattacttataagtatgacagcatgggacgtgtcatagaagagagtaataaagattttggaacaaagctctatgaatatgacaaagcaggaaatctgaaaaaatataccgatggaaatggaaatgcaaccgtatccaagtttgattctcttggacaggtgcttcagtcaaaagatgcagttggtaatataaccaaatatgaatatgacgcattaggaaacgaaaccaagattacctatggagatggaagcagccattccaaggaatatgataactgcggaagactcgctaaagagacagatgaattaggtgcagttaccacttacgcttatgatgcggcagacaatctggtatcaaaatcagatgacagtggaagaacctggacttatacctacgataatacaggaaaccgcttaagtgaaacgaatccagaaggtggaactaccacatatacttatgataaagtccagctaataaatgtcaatagttaaatgaaaaaattgctcttattttctggctaaaaaagggtagacatcccccttggtgaaaatatcgttcttttgaaagatattgattcgttggatgtacagtattttatgcagccatgtcgcatttggaagcattgtattgtttgatatgctcctgtggagtgatgatttcaaaagacttgttgtctctgagtattgcaaatatcatattgcataccttatgtgaaacagctcccattgctacgagctttggttttgagtcacatttcttgaggtagtactcacgaagaactggatttttagcttctccattacgggagatactaatgctttgtaaggttaacgtgtgaataacacgtctagctatggcagaaccacgcttagacatttgaactttggtaccttcaaattttccggattgttttactgccggatcaagaccgaaataagcgaaaagttgttttggttttgaaaaggctgaaaagtcaccaatctcacccatgatggatacagcagacaagaaaccagcacctttgaatgtttcaatcaaatgaatctgcttgacaaagtcggcatcttcattagcatcaacaagctcatggagcgattcaagaatgttgttgatttcttcatcatatttacgtatgaagctgatataaaggcgaatacgcttgatgttgctgtctatgatgtaaccaaactgatttgcatcagttgccgcctgaattatggcattatacttattttgagcatatgtaagcccaaagcgagctgttgatttgatgatatcaataatctcttgcttgtctgcttcaagaaaagcagagggagatgtataagtctccaacagtgtaagagaagtgttgattgtaaccttggaaaagatgccgagatactgtggaaacgccatgcgtaattcaccctgaagcttattcacataggcaccgcgattatccattaaatcgtagtattcacggcataggttacggcagtttagagcaaggtctgaaggcataagtgaaacctttaaatcaggtttcaaaccaaccaaagcagcttttttagaatcaaaacgatcattatgtacttttcgtatgttgatgtttgtgctattcttagtgatgataggattaataacagagcagttaaaacccttatcacgaagatagcagaagagtgggtaatgataaattcccgtggattcgaggaaaatgcgactttccaaagaatacaactcttctgcttcttttattttagaaacagcggttgtaagggaatcaatactgctatgtaggattttgtaaggttttcctacgaattgttggtttggaagtgctatagacatccaggagaagtcagcaccgacatcaataccaacagagatgaataaatcatcgagattaaagataactttgtttgacatgagcaatagctcctttctgataggaatccatttccaatctggcaggtacacaacctagcgcgttattcgggtatggccttccggctcccaaccagctaaaacataaaaccctgtcgaatggactaattgacttcattgtaggtatcagtcacaagagtgacttcccaaggaggtgaacattctttgtcctatcctaagagataataccttatgttttatctggtgtctatcaggaaccgtcagacatgatcattattacggataacatctgatgaaggaagaaccccttcttctgttatctgatttatagaaacttattaaccaagtagtcttgattgactacatcattattatactagcaggtgatctggtatcttctaccgatgaagagggaagaacagatacttatgcttacgacaaggtaggaaatctgacttcatccaaagatgcccttggatataccgtatccatgaagtatgacttaaatggaaatctggtatcctctaccgatgaaaatggaaataccagtatcatgacttacgatggtaatggaaacatgacatcggtaaccgatgcaaagggcaacattacagcaatgaaatatgattccaccgacaatctagaacagacggtggacgccctgaaaggaaagaccacttacgaatacgattcacaaggcaacagcacaaagatgacggatgccctcggcaatgcgtacagctatgtgtatgataaagagggaaataacacatccataatactgccgacaggggacaaggtgctgatggagtacgatgccatcggacagcttgtaaaatgtacggatgcacagggactcgtaattacctatcaatatgacggagcaggcaacctgatccattcctccgacaatggcggaaacagtatggattatacatatgatggtgccggaaatgtactgacacagaccgatgaactcggccggacagcaacatacaagtacgatcagtatggcaggctcctgaaactgacagaggcagacggaagtacgacctcttacgaatatgatgttatggaccgcattatagcggtaacggatgcagaaggccatcgaacaagctttacttacgataaagtcggcaaccagttatccatgacagaagaagacgaagccacttaccagtacgcatacgataagaaagaccgggtgatctcccagacaaatcctctcggagcatccagcacctttaagtatgacggaaatgataatgtgacggaagcggcggatgaaaatggtacagtcaccaaatacgcttacgataaaaacaataatcttgtatcccagacagatggaaatggaaatacgacaacgtaccagtatgatgaactggaccgcaagatcggggaaacctctccattaaaagagaccaatgaataccgctatgatgccatcggtaatcttaccaaatccaaagacccgatgggacttattacggaatacaaatatgacagcttaagtaatctgacagaacagatctctccaaagggagcagtcaccaaatatgattatgacaagcatggtaatgttatctccgtaacagatccaaaaggaaatacgacccagtacagtgtggatctgaatgataatgtcacaaagatgacacaggcgaatggtggcgaatatacttacaattatgacaaagccggacgtctggagagtatgaccagtccgctgggttatactaagaatttctcatatgataaagtggacaatgtggtaaaagaaagcgacagcttaaagagtaccaccacttatacttacgataagctccataacatgaagtcttctaccaatgcactggatggaacaaccagcttttcttatgataagtatggcaatctggtgaaggagacagatccacttggacggagcaatacctacagttatgacctggcaggacagatgacttccgcagccgatccgcttggtaagataactgcttatacttacgacccggcaggaaatattacagacatcacaaagccgggtggaagaaagaccagctatggatatgacaagaattataatgtgacatctgtaacagacccgatgggctatgttgcaaagacagtctacgataaagacaatcgtgtaacagaagagaccgatgcactggggcagaaggaatcctatacctatgataaggacagcagggtaacttctattacagacaagcgtggattcacaacgggatttgattacgatgcacatgggaatattcaggttgttacagataagactggattaaagagccatctggaatatgacaagaatgacaacctgaccaaagtaactgatgcccttggcggtgtaacaacttatggttacgacaacatggataacctggtgaccttcaccaatgcagcaaataagacaacgaattatacttatgacttagaaggcaacctgacatccatcaaagatccggcaggaagaacggagaaattcgactatgatgaaaaaggcagactgaccggacatacacaggcaagtggcaagaaaaccacgtatgattacgacaaactgaatgacctgttggagaaatcttatcaggacgcaaaaggcgagacatccgaaaaggacgtgacctacgcatataacagtgccggggaacgggtatccatgaaggatcagactggtaagagcagctacgaatacgatgcacttggaagaatcaccaaagtgacaagcggttcgaaaaaggatgtcagctacgtttatgatgacgcagataatctgcaggcaatcgtgtatccggatggtaccaaggtcagctatgaatacgacttaaatgataatctgataaaactgacagaccgtaatggaaaagtaaccacatataagcatgatgcgctgaatcgtgtggttgaagtcattagaagcaacggaacaaagacggaagtatcttacgatgcagaagatcatatcacaaagattgtgaatacctgtggttcctgtggcaaagtaatcagtacttatgagtacaagtacaatgatcagggatatgtagttggagaaacagctacggaactggaagccggaacaagaaagacaccaagctgggaagactggtacaactggggcgacacaaagaaagagacaagcaaagcagactgcgagcatcaggaaaaagagatccagacaacacgtacttatgagtacgatgataactgggaactgacacgctgtacagaaaaagcagagggcggtaaaaagacagtccataattatacgtatgacaagatcggaaaccggacttcttatgagaagattgaagatggtgtcagcaaggcaaaatataactataagtacaacgattccaaccagctcatcaaacgtaccaatgcaaaaatctggggcgatccgggaacaacctacagctatgataaagatggcaatctgattcaggaatgaaaaagcaaaacagacttatcagaaagtagcatccgctggatctggatttgtgaaagcggtaagcagtggcggaatacgaggcggtttcagttatgtgggaaatggagcgaagaaagtctatagctcgtttaaatcctatgcagccgaacgaaccagcgagattcgtgcaacaattcataaagaaatgtgtacaaccaataaccgtatttcctctcttttgggaaaagtagattggagcgcagtgaaaaaggttgttgcaggcggagtaatccttggaggtcttgcggcagcaactgttcttacaggtggagcagcagcggtgattgccggaagtgtattaagtggtgcagccgatggattcttatggggaacgattggcggtgcagtgtcaggcggtgttggagctgcgacaggatctttggcaagtagtactgcctcatcagcactgaaaaatccattagcaaagagtgcaattgaaaatgcggcagatacggcagtcggaacagttgatgatttagcgcatggtagagatgtgactgcacaagatgtcgctcttgatttcgcaaaaggcatgatttcttcaggacttagcaaaaatagcggaacattagattcagatagtaatcatttaacagatacagaaatcagttggccaagtaaacctcatactaataaaacagagggacatcgggaaacaattgttgataaaacaaatgaattagcagaatcaggcgaatataaaaaaatctatgtaaataaaggtatccgcaatgaagtgaaggacgtgactccgaatagaagagctgatataacggaagtaaaaagagacgataaaattgatttgtttgaagtaccgagtaaatcagatgatccagataaattagtagagcgaatgaaagaagttaataagcaattgggtgatattaatttagtatatattaaaaagtaagatttagatatataataaatttgaagaaccaaatttgggaatgaggatttaaaaagatgggctagcttttttttaaagtctcttccataggaaaggtagatgataaatgagatggaaacaatttcaattacatatagaggtatagtacataaattaacagaatatgaaaaactagttgatacaatagaaatgatatatactatgtgtgatcagaaaattactcattggggagatagtataacaggtaaaaatggcggtaaagtgaaaaagtataaaaggggtaaaatcttatataatagtctaaaaaatgataatttagaaagaataagtttttttcccttaccggaagattttgtaacagcagcattcgactatactatatatatttctataaattacaaggagaagtatataacggcggtatttgaaaaaaatgtattaaagaatgaaaaaattgaatcgataaaaaatgtgctggcaagttacatggaatcgccgtatacagaagagatatatactatggacaaggaagaaccccctttactgtatgctgcaaaaagcaaccctagtagtagttttaaaacgttgagagtattatctaacaaaactataaattaagcgagaaatcaaatcctaaagctgaaagaattgttattggagatgatggatcggtatggtatacaaatgatcattattattcatttacgaaaatcgaataagaagggaaaagaatatggattataaaaaattttttgaaaagagaaatattgaatatcaagaaggactaaacgaaaaagaaatttcgcacattgaagagatatatgatatttttttcccgacggaattaaaagaagtactagaacaagtccttcctgttgaaaaaggattctataattggagagatttttcgaaagaaaatattcaatatattattcagaccattgaaagaccgaatatagatttttttagagatgcggctgatatttattggaatgatgattggggaaaagaaccaaaaaataatgaagaaatagaaaaaatagtaagaaataaattgtctcatgctcctaaacttattccaatttatactcatcgttatatgcctatgattgatgaaaaaaataatccgattttttctattcatggagtagatgtgatatgttatgggacaagaattgatgaatattttcaaattgaatttggagaaaaaaaacaagaatcaattaaatattcagagataaaacaaatcccattttggacagaaatgatttgagataaggtgaaaaggcacgaggatgacaggatgaagagattacaaaaatatagtgattttcggaacagcaatgttatgtgctggatttagtgtttgctctaaacaaccagatttcgatgccaaatcctatgtccaatcttctcttgaggcagtgtatcatggaacatacgcagattatgctcttctgatggaaatcttagaagaggagattgcaacttatacagagaagccacatgtacattttaaagatggaacagctttaaatcaagatggtacagtacatgatgcacataaaggaaaacctaatttaacaaatggtacaagaaaatgggtggaaaggaaattaaaaaatgaaattttatggatatgaaaaagataatgaaagattaatgaaattaagtgaagtaacatttgatggaactttagaagaattagaggatttaattaattttttgaaaaatgtccaagaagagcatactaaggtggtaaaaaaaacggatatatgtcattcgcattttcgtgattggagtgataaatggaataaggaggattcagattttattgtggtaacacgattctgaaataataatgaaagcatccgccagcaatttacctcttccgacaacatcacagaagaggagattgcagcttacacagagaagatggcagaggttaaaaaactggcgaagtacaaggtgcaggatgagaaaaaggatgaggatgaaaattacacggtcagtgtaaaagttgaaccgtccgatgtgtttcagacattgcagcagagctccgcagaagttagcaaggaaaagattgcacacggaatgaaagaaacaagctggagacagcgatgtttccaacagaataactgaatatcgaagaagtggactgccagcaagacaagtgaagaacgaaagtggaattattggaaagaacaggaagaaaagaaactgcgtgaattgggaatggcagaacagacgatttataccaaaagaaaccgtttgagaaaaaaattaaaaaatttgtcaaaaattgaataattatggcgtttttgtttcgagcgaatcatctttaactgaaacaaggaccgtggcggtcttttgcgaagatcacttacgaggggataatgatacataggaactgccagtgagcagggaatgcccgaaaaaaggttcctgccggtatcagcagtatctggaacattccagagaggatgaaatgttcatctagatctgcaaccataattatctgctggcagatggctatcacagactgcaggattaccgcccgttactaaaagactatcgggcattgatcgtagatgaagcattttgaaatcattaaaagaatccgccagaaagaaaacggttgttctggtattccacagagtatccacaatggccgtggcagatgtggtatatgaaatggagaacggaaggatttcttaaaatacacattatttaagaaaagacggtgaattccaccgtcttttctcattcatctaagtttatttatcaatcccatctgtctcaataataaaccgtacttctccggtctgttcttccaacttaccgccataattatcgtattcggcgtccgcttctttgaccgctttcattcttttggagagattcttcagatcatccccgcctagttttttaagttcctggattccttctttatcaaaaagagtaagcccttcagaaagagaagagattccttcagcaagggttgtgtatccttcttttagttctttcccggttgtgcccagtttcgtggctccttgagagagtgttgaactacctgcggacagttgctcgattccctgttggaaagaagtaagtccctgagtgagttgtaaactgccggcagataaagcagaaagtgagttctgtaaagtctttaatgtctcactgagagaagaaagactctgtgctgcctgagcaaaggaaccggcaccggaagacatctggtcaagcgtagtatggcaggaagcaatcagttccgtcaggctgtttaatgttccttccgtggcggatttcagcagatcgatatctgtggaggaagaaggaagatcaaggttctgatcaattgcagatgcaatcgtatcatttatttcattttttaattgtgacatcttatcattgacagcatttttagattcttctgataattcagaatcggatgcagtttcagaaacaatctgatcgatcgcagactggacagcatctgtcgcagcggttttggactgttcttttgcatcttctgtgatagaagatttcagagtatcccagttgacggatgcgaaggaggattttgcctctgcgagggaggaatcaacagaatccagctgttgtctaagtgatttgatctgttcctgaagtgatgaaactgtttcagcagacggaatagaactggaatccgtgttaatctgaccagagagagcagaattcaactgttcaagtccattttgaagagaagaagcacctgaaaccagctttccggaattttcattaagtgcagttacaccgtcatctaaagtgtctgttccctcggcaagttgtgagacaccgtctacatattgcccaagataactttgataagtagaagcgccgcccagcagctgcgctgctccgtcagctagtttgccggatgcatctccgagctcctgcaggctgtcagctgcatcctccatatcgtcaaaggaatcctcttccagattttcaaacagaccggaggaaattacggtcgcagtaaagtccatctcaaaatctgttacatctgcagttacttccactgactctgggatagagataccttccgtaggttcgtaatcagtgagtttcagactgtctgtgagtcccgggcaggcataaccgacaacaacgctttggtcatttattgtaaatattttaccattcgtcacctggatattagaagcagtgtcttccggaagaatcatggcagagatcacggcaaatggaaccggagaagtcatctcttcaccatttacagttacattttcttcggtagtattttcataatcaaaacgaattccaagttttccactttttccggagagatcttccggccgtatagactttccatccagtgtgtaactgatttttacatttataggaagtccttccgtagaagtcccttcataatgaatgtccgatcctttgttttcccaggtaatcgtcccgtcagaggattgggtgaaggactcattacctttcgtattttttatgtctttcagagttgagaagtctttgatttcctttgatgttccggtattttttaagtctgtctggaccttgatctcatgtatcgttccgcttgcgtcagcctttacatatacggtttctgatttatcagcatctgaagcagtagtagctgtcttggtgtcagttgagcatcctgtcagacttgtggcagaaatcaggacaagactggcacacagaccaggaactaatttttgtaaaatttttcttttcacgagaaatcctcctttcaaatggtacctgcactgttatgcctaacttagaagtttgcaggtacagtcacgattattcaatattttttaaggcctgatccataggaactttcttgatcctgcggtattcggtcaatgcaacaagcaagtaagttacgaatcctagcaggaacatttttacatacaggaccggattaatgtacaatggaatccaaccagaaatactgctgagcataattccgcggaagagagcgttcataagaactgtttcgatcggaaaactcagaagcaggaaaaccacgaccataatggttgtagacagcagatacagactgctgatctcccggtcagagtatccaagtatttttgtcatagagatcgactgtgcattcttttcgataatgatctttgacaaaagatagatcagaatcataaaaagcacgattgaaaatccgtctagcagatacatcatgcttcccatcgaaacatttagctgtctggaaatcttggacaaactgtcgaggtcaatcacagaaccgatgtatttcggatcaatatctgtgatctcgctgtctgagagaaaaccgctgaaataatcggagccaagatcaaacagtttattaagctgttcttgtggaaggaagactgtcagccccccttcataatcgtagattccttcaacataaaatgtgtaggtatcatcttcataagcttcttttaaagtgattttatcaccgatatccagaagatatttatctgcgtatgcggaagaaatatatacaggagttacagtcgaagaacctgtctgggtcgatccgtccttatcagttgcagtttcctgaaaatcaatcggaagatagcggctgttatctgcaagtccatagagcaggatttcctcttccttatattccttatctgttgttttcagtgaataagcactgaatttctcggcatcaggattatcggtttccaccgcatgctgaaaatagagcatattcacaaggctctccagcttatgatcttcgtccatggcgttgatcggtatctgcaaaatgtactggtagttacaaagcaggttatcttctagaacagtctgataatgatcgagtacagccgggaagagcagaccgaacatcaacagaaggtttgcaaataagattccgaggaacagcagaaggtaattgctgacattctggaaaatcacacgcagtctgaaacgactgaaaaatggaatccttctactcagtgataatgcatgcttctgttgtcttctctttaagtctctgcggaggaacttcaaaggagaaagtgataatcttctgcgaagtacggtataattgacgagaagcattagcaagatcggaatgatcgtagtaagcagaaatgcttctgcgttccagacggttacatatgtcggaagactgtagcttccgtaatacatgccgacgcagatatctttcatgatcgtatagccgagaacatttccaatcaaagcaccgaccagtgtgacaaggatcggcatggccatataatggcggatcagttcatttctggtgtagccactggcaagaagagtcccgatgacatttgcctcttttgcaatggtgttgctgattgtaatgccaaaaacaaacgccatgattgcaattacaatataaagaaatacgatcatcattgtgcggtcgcttcccatatcatcccgggtaaatatgattgcctgattgagataacgcggaacgaattcttccagagaaacctccttgttgattgctttcatcagatcatcagatacttctttttcttctttctctgttgtaggttcatcgttgtatttccacgcatagcagtattttacaagtggagaatccaatgattcaaatactccggacgttacaactccaattccgaatttgacagaatcaaacatggaatcgttgttgttctggaaaagacagctgtaatccggaagagcaatgaatccggttactttccagctctgtgtatcacttttcagtgtgtctccgatggaaatcttattgttgtcagcatacatacggtcgattgcgatttcatttgccgcttttggaaattctccttccatgaggcaggcaagattcacctgctccctgtttgcaaagatacgcattgtgctgccatttgttaaatcctgttccagatagaaattgttatagatccggataccatttccttccacagactgaatctgcgcatcgttcattttttcagaagtgcggaaatgcccgttctctgtattatatttgttgattccttcattataagctttgatcatgctgccatcggcaacaagaaatccggagacaaatccgatggttattacaagaagaaggaagataacaagatacttaccaaagtctttccggaattctctggggagacgtttgtttaatggatttttcattgtctgcagcctcctttaccagtcgagttcctgcgcactgaccttatgatcgttcagataattttttcgtatcataccgtcacggattcggacaacatggtctgccatatctttgatcgcatcgttgtgcgttaccattacaactgtattaccgtacttttgattgactgtttcaatcagcttcagtatctcttttgatgttttataatcaagcgcaccggttggctcatcacagagcagaatatcaggatttttaacaatcgccctgccaatggcagtacgctgttgctggccaccggagagctgattcggcagcttcttctgatgtgcagaaagaccaagggtatcaagaagttcatctacatctaacgcgtgatcacttaagtaagcaccgacttcaatattttcgcgcacagtaagattgggaatcagattatacatctggaaaacatatcctagatgcttccttcggtattgactaagacgtttcactgtcattttttccatcagttcgccctcaattgtgatctgcccgctgtctgcacggtcaatgcctccgataatattcagcaaagtggattttccagatccggaaggtccaaggagaacacagaattctcctttttcaatcgatagatcaatgccttttaagacttctacacggctgtcaccctgcccaaaggattttttgatattagttaaggataaaaacatagtccgccccctgttctgtgtgagaattgagtttatcttagttaggaatactctgacttcaaacaagatagataaaactcacacatattagaaaagaatagttattgttagttatatctaacaaaattatatcacagagatgtaagaaaggcattataaaaaatatacaaaattgtgtctatttgatataatggttactgttcacacgatgtgcgaccagcaacgcatctcgccattttaaatcgcctttggcgatggggcgagatgcattcaagccaaaacatgcatcctccgtgtcaatcagcggagtgattgacacgggagtgaacagtaacatataatgactttatatgaaacaatccgcaggtattgtagttggagataaaagcaaaaaaacaaaacggtgtctgacaccagggggagaacgcatggaaaaagcaaaagtaatagaattaaaagagacaattcttgaagacaacaatgcagatgcacaggtactgcgacaggaattaaaggcacagaagacatgtctgatgaatctgatgtccagtccgggaagtggaaagacgagtacacttctggcattgaaacctcattttgaaggaaaaatcaaatggggcgtgatggaagcagatattgattccgacgtggatgcgaatacattgatcgaagcgggagttccatcgattcagctacataccggtgggatgtgtcatctggatgcagatatgacacgacagggaatcagagcgtttgaaagagatgatctggactttgttgtacttgagaatatagggaatcttgtttgtccggccgagtttgataccggagcaaatttaaatctgacgattctttcggttccggaaggagatgacaagccggccaaatatccgttgatgtatgaagtatcagatgtgttggtaataaataaaatagatgcattacctgtttttgatttcagaaaagactatgttgaagcatgcgcaaaaagattgaatccacagattaagatcgtttacatctctgcaaaaacaggagagggtgtaaaagaactggctgattatctgttggaaaagatacaggaagtgaatgcataagatgttgaagaaggggaaaaaacatgggaaatgtcagagtaattgagattaaagaaagtgtgtttgcggataatgatgctacttcaaaggcaatccgcgagaaaatgagtgcgcagagaacactatttttaaatgttatgtccggaccgggaagtggaaagacaacatttctaactacattgatcaatagattgaaagatcaaatgaaaattggcgagatggatgtagatattgagacaagtttagatgcacagagagttgcagatctgacaggagtagaatccattcagatccataactgcggattgtgccatattgatgcagatatggtatcccgtgcattactcgaatatgatacagagaaccttgatctgttaattcttgaaaatatcgggaatctggtctgtccggccgagtttgataccggtgcacataagaatgtgatgctcctaagtgtgccggagggagatgacaaaccactgaaatatccgttgatgtttcaagtaagtgatctggtattgatcaataaaatagatactctggagtattttgattttgacttcgaagttgcgaaagaacggattctgaaattaaatccaaatgcagttgttcttccggtcagcgcgaagacgggagaaggaattgagagagtgatggactggattatggaagaaagagaaaagctataattatttcagatataaaaagggcttcctggtaattgaagggaggtcctttttgaaaaacggattgattatttatatatcatacatgcgtgcagtcaggttcaggctgaagtcgttttgtcacaaaggaaagcatactttcgagtacctgacatttattgttgcagacagggcagaggatgcaagatacattttcttctgattgggtcggggcggtttcttgtgataagaaaataaaatcgtataaatattcaaaaaattctttattcgttggttttctgtccatatgggttctgttgaaaatcatttcaagaatagttttattttccgcagtccagattgcattgaccgtattgcggatgtttttttctacacaagaccagcttgtctcataatgggcagcaatatcgatgtacaaagctttggtaatattggatacacgagtctgatcctcgtttatcaagagtaatccatacacaatgtaatcataaccaagactagttctggcagcaataagtttatcaagtgtagatttgatttcaattacgagtgtattgtggttcatgagagtcccccttaaaaagtaatgtagataagaaggaagagcctgtttttgatatcatatctattatatacgtatttattaaatttgtaacgacaaaatttgtgagtgacttaacaaatttttaaggagaattatcacttgatttttcaagaagaaatgctataattaaaaagatgtctgttaaggcagaaaatatcatatggagttgtatcgaagtggtcataacggggcgcactcgaaatgcgttagccctccggggcacgtgggttcgaatcccaccaactccgtttgtatgtttagcatgtaggtatcattataacgataagtaaaagtaagaaaaaagcactaacagaagagatatcactcttctgaaagtgctttttcgttttaagaatgagaaacaatatgcttcttgattgcgttgaaactttcctcactgatcacatgctccatacggcatgcatcatcagctgcaacctgtggatcaacgccgagtctttcaagccaggaagagagaagagtgtgacgctcatatatcatgtcagcaattgcctgtccggattctgtcaatgtaatatagccctcacgagatacaataatatgttcgctttctctgagttttttcattgctacactgacacttgatttcttaaagttaagctctgttgcaatgtcgacggcacgtacgacaggaagcttcttgcttaacatgaggattgtctccagataattttcagatgattcatttacatgcataggtaatggcctcctctatataaattataatttatctgtatcactatttacagtgaattttcatgtctttgcttagtatatcataatttattccctacagcaaatgatttgccagacaaattttgattccccaattccgatttacacggaacagaaaaattaaaaaaatataaattagtcattgacaactaatgagaattagcatatactaacttacgaacagaagagaaaatgaaaaaaattatcaatctcaactgtttttaataatctatatcaaatgaaaatggattctaatatcatttaagaaagaagcgtgagattatgccacttacaatggccaacattggcgaagccaatacaattaaaagagtaagcggaaatgatgagacaaagcgttttcttgcgaatcttggatttgtaccgggagcagaagtaatcgtactttctgccattggcggtaatgtaattgtaaacatcaaagattcaagagttgcagtaaatgccgatatggcgcgccatattatgatctgattgagacgctgaaaaagtgatgagtaaagtaaggaaggagtatgtgttatgactttaggtgatgcaaaagtaggaactactgttgtagttacaaaaatcgaaggagacagtgcttacaaacgccgtattatggatatgggaataacaaaaggaagtgaactttttatcagaaaagttgcaccacttggtgatccggttgaaattacagttcgtggatacgagcttactgtcagaaaggcagatgcacagtgtgtagaggttaaataagcctacagatacaaaaaacctgatgagagattctagaatttaaggaggcaaagagagtaatggcaatcacaattgcacttgcaggaaacccgaactgcggtaagacaacactgtttaatgctcttacaggagcgaaccagtatgttggaaactggccgggagtaacggtagagaaaaaagaaggtaagatcaagaataagaaatacaaaaaggaagacgttacagtaactgaccttccgggaatctattccctttctccatatacacttgaggaggttgtcagccgtgattatgttctgaatgagaatccggatgtaatcgtcgatcttgttgatgcaactaacatcgaacgtaacctgtatcttacaacacagcttgttgagacaggagtaccggttgtaatcgcattgaacatgtgcgatcttctcgctaagagaggtattaagattgatgtaaaacgtctttccatgctgatcggatgcccaattgttgagatttcagcattgaagcagaaaggtctggatgaactgatcgatgaagcaatcaaagttgcaaagcagaaggaagtaaaacttcctagtgagatctttgcaaaagatatagaagctgctgtagaaagcgtaaaggaaatccttcctgatacaattacagaagataaaaaaagatggtacgctgtaaagttccttgaaaatgacagcaaagttgtagatcagataaagctctcaggtgcagcaaaagcagttgttgaagatgaaagaacaaaactggaaaagaaacatgatgatgatatggaaagtattgtaactgacggacgttatcagtttattcagaaaattgtaggaactactgttaaaaaagcaaaagaaaaactgacaacatcggataaaattgaccgtatcgttacaaaccgtatcctcggtattccgattttcattgcagttatgtggcttgtatattacatatctgtcacaacagtaggtacatttgtaacagactggacaaatgatacattcgttggagccattcaggaggcagttggaggattccttacaaatgtcggagcaagtgatctgatcaacggacttgtagtggatggtatcatcggcggacttggagcagtacttggattcgttccacagatggcaatcctgttccttttcctgtctattcttgaagactgtggatacatggtacgtatcgcattcgtcatggaccgtgtgttcagacatttcggactttcaggtaagagctttattccgcttctgatttcttcaggatgtggaatccctggaatcatggcttccaagacaattgagcaggacaacgacagacgtcttacaatcatgacagcaacatttatcccatgtggagcaaaacttccggttattgctatgatgggtggagttattgccggtgaagtagcaggatatcaggagagctccttcattgcaccattgatgtactttgtaggaatcgttgcagtacttgtttctgcaatcatcctgaagaagacaaaacctttctcaggaaaaccggctccgttcgtaatggagcttccacagtaccatattccacaggctaagacagttctccttcatgtttgggagagactgaaaggattcatcatcaaagccggaacaatcctgttccttgcatgcgtagtaatgtggttccttggaggattcggatttacagcagatggatttggacttgtagaagacagcgcagacagcttgatggcagcaatcggcggagtgatcgctccactgttcgcaccacttggatttggtgagtggcagcctgtagcagcatctatctcaggatttacagcgaaagaagcaatcgtttctacaatgggagttcttgcaaatgtgtccggagatacagaagacgcagtgacagtagcacagggagttgcttcctggttcccgtcaacaattgcagcatttacattccttctgttcaacctgcttgactcaccttgtcttgcagcaatcgcgacaatggcacagcagatgcagtccagaaaatggttctggtttgcaatcctgttccagaatgtatttgcttatgttgtttgcctgatcgtataccaggtaggatctttcgtaacaggcggagcatttggcgtaggtacagcagtaggatttatcttattgatcttccttctgttcatgctcttcagaccagatccgtacaaagatcagaaagtatactcaaaacgttctgtgcaggcagcgtaatatgagagaaacaagaacatgaaagcgttcttgaaaaatagagctggatgcaggaaatgtatccggctctctgttataataagagaaaaaagaggtgttgatgacaatgatagcaaatattgtaataataactttaattatcggatattgtatttttctcatttataaaggatataagaaccataaagaagggaaacatgtcggatgcgccggatgcagtggcaactgtggaagctgcggcggatgcagtgcggcagctggaaaatctcaatatacaaagaaaaagtaaaaggtgattagaatgggaaattcaacaggttctatgttttacgcatttggtgcatttcttttgatttaccttgttggtgtatccatctatcagatttatctgtggatcaagaaatggcgagaaaacagagaagagaaagaagactaaaagagggatcacaaaatggcagatattatcattatattaattgtaatcatcttgcttgggttggctctgaaaggatcaatcaaacattttaaaggagaaggtccttgttgcggaggcggttcaggaagcagcaagaaggcaaaaacaaagtttttagacggtccggtgattggcagaaagacgttgaagatttcaggaatgcattgcaagcattgtgcaaataccgtaacgaatgcattgaatggattggatggtgttactgcaaaggtgagtttgaaggaaaattgtgcagaagtttcctatgacagagaaattgatctggtagatttaaaaaatgcagtaaaaaatgcagggtatgaggtcacctctatctcatgagagtgaaactctgtgagatggcgaagtaactaatacagcgaagaccagaaagcaggaggtgtaccgtgagtaagaaagagcagattatcgaaaaattaaaagaaaacggatgccggatcacaaaacagcgtaagatgttgattgatattattttggaaaatgaatgctcaagctgtaaagaaatcttttataaggcatcccaggcagatgaaaagatcggtgtggcaactgtttacagaatgatcaatgcattagaagaaatcggagcaatcaacagaaaaaatatgtataaagttgattgtgcgcaggattgtccggaagatggaggatgtatcatcatgctggatgatgatacgatctttaaacttacggaaacagggtggaacaaggtgatccgcgaaggactgaaacattgcggttatgtaaaagatcaaaaagtaacatcaattaaattaccggataataaacgataaaatttatcgataaatgcagttagaattgactatctgcatagtgagttgatatgatgtataaaaattttaggaggttttatacaatgtgggatatatttaaattgaaaaaagcaggaatctttgcaggaggtgttcttttcggaacagcaggagtgaaaattcttgcaagcgatgatgcgaaaaagctttatacaaactgtacagcagcagttttaagagcaaaggattgcgttatgaagacagctacaacagttcaggagaatgcagaggatattcttgcagaggctcagcagatcaatgagtcacgtgcagcaaaagaggctgaggctgtctatgaggcagaagaagcagaagagacagaaactcaggaagagaatacaggtgcgcaggatttcaaagaggaagaagtttaaatctcaatgaaattcattgtaaagcatgagatcaatggccgccttcgtatccatgttgtccaaaaaaggatgacatatacggaggcggatactctatcctggtttctctctaatcaaaagaatgtaacagatgtaaaagtatatgaacgcaccgcagatgctgtgatctgttatgttggagataaggaagaggtcttgaatttattgaagcagttttcttatgaaaatgcaattcttccggaacatgttgccgcaggttctggaagagagctgaatgctgtttatcaggaaaagctggtcatgaagacagttcttcattatggaagcaagttattccttccaatgccggtccgtgcagtaattacatcagtaaaatcagtgaaatatatctggcacggaatccgttgcctgcttcatggaaagattgaagttcctgttctggatgctacagcaatcagcgtctccgtattccgtggagattatgcaacggccggatccgtcatgttcctgcttggaattggtgagatcatagaagaatggacgcataaaaagtctgtcggagatcttgcgcgcagtatgtcacttaatgtcaataaagtgtggctgaagagaaatgaacaggagattcttgtaaaatcatcagatattgagccgggagaccatgttgtgatccgtatgggaaatgtgatcccgtttgatggggaagtagttactggtgaaggaatggtcaatcaggcatctcttacaggtgagtcacttcctgtaagaagaagtgcaggacagtctgtttttgccggaacagttctcgaagaaggtgagattgaagttcttgtcaaagcggtatcaggctctacgagatttgagaagattgtgacaatgatcgaggattctgaaaaactgaagtcttctgtagaaggcaaggcagaacatcttgcagatagacttgttccatatacattactggggacaggtgcagtctggcttctgacaagaaatattacgaagacactgtctgttctgatggtagatttctcctgtgcattgaagcttgcgatgccgatcactgtactttcggcaatccgtgaggcaggcgagaacaatatcacagtaaagggtggtaagttcttagaggccgtggccgatgcagatacaatcgttttcgataagacaggaacattgacaaaggcaacgccgacagtgaaagagattgttgctttcagtgaatactcagaaaatgatctgcttcgtattgcagcatgtctggaagaacattttcctcattctatggcaaaggccgttgtagatgcagcgaaagaaagacatttgtctcatgaagaaatgcactcaaaggtagaatatgttgtggcacatggaatctcttcctctattgatgataaaaaggttctgatcggaagcagtcatttcattttcgaagatgaaggatgtacgattccatccgaatatcaggatagatacgattcattaaaaccagaatactctcatctgtatctggcaatcgagaaacaacttgttgcagttatctgcattgaagacccgcttcgtgaagaggcggcggaaatggttcgtaatctgaagaaagcaggtatccgtaaagtcgttatgatgacgggcgatagtgagcgtacagcagcggcaattgcgaaacgtgttggtgttgacgaatattatgctgaagttcttccagaagataaagcgaatttcgttgagaaagaaaaagcagagggaagaaaagtaattatgatcggtgatgggatcaatgattcacctgctctttcagcagcggatgcggggattgcgatcagtgacggcgcagagattgcaagagagattgcagatatcacgattgcggcagatgacctgcgtgaagttgtgacgctgaaacttctggcaaatgccatgatgaagcggatacataagaattatagaaatatcgtcggaatcaattcagggctgattctgcttggcgtgacaggaattgtccagccgacagtatctgcacttttgcacaatgcgtctacattgatgataagccttggaagtatgaagaatctgctggatgaaaataaaagaacagaacatgagtaaggcaggaactgccgggatcagcttttgtaaaggttgaacccggcagttctttagtgtaatgagaaagattatcagttaataatattgatattacgtttttgatatagtatagtaaatgcataagttagacataactaacacaagcaacagagacatgtggaaatgaattcataaaccatacaggaaaagtaataagtaaaataatagataatcagatcttaatttcaggaggttcagtatgagtgtagtaatcattggaggacatgacagaatggtatgtcagtataagaaagtctgtaaacagttcaattgtaaggcaaagatcttcacccagatgtcagcaagtttgagtaaacagatcggaagtcctgatttgatcgttcttttcacaaacacagtatcccataaaatggttcgctgtgcggtagaagaggccggtagatgtaatgcggatgtgattcgatgccacaccagcagcaagaatgctttggaagaaattttggagaatgtttgtgcataataaatatatctgagttattgaaacaatgaaaatagaaaagtcctttcagaagaaataaactcctgaaagggatttttctgtatcatgctgccaattacgtagattatcaatctgaacaggatcacagcactaatttttataactggatatttttaaagagatctccaaggtttgttccgatatcttccgctttcgggatcactaccttttccgctttctcttccgctttttctttgtcttcttcgagagctttcatgctcaggctgatcttaccatctttgataccgatcacctttacttcaacttcgtcaccaactgtgagaacatcagaaggcatttttacacgcttttgggaaatctgggaaacatgaaccaaaccggaaagtccgttttctaatttaacaaatgctccatagttctgaagtgtctctacagttcctttcagaacagttccaactttcagacttgcaacctgtgcatcacgtgcggctttctctttttctttcagaagctcacgtgcagaaaggacaagacgattgtttgcctgatcaacatcaatcacctgtacttcgatatctttgagaagataatcttccagattctcgatataggaaagggatagcttggaagcaggaacgaatccgcgaagtccttctactataacgattacaccgccgttaacaacaccttcaattttaacaggaagaacagtttttttatccatataatcctggactctgttccatggattcgcatcatcgaaatgatcttcatagtctgccattgtttctgttacttcatttgtctgtaattctttcatttcttcgctcattaaaagcacctcattttctttttctcgttaatcaaaagtataacatatgtatgagaaaaaatacaacaaaagcgccaaaatccgtgaagaaaatgaaaaatgcggttggattaacagaaaaaaaatgttactctacttaatgaagcagctattcatgtaagatgacagaatacagagataaattgatgtgagtataaaagtaaataagagataaatttgagaaggagagatagaaaatgactgagaataaaaaggtgtatgttgtaggtcataagaatccggatacagattctatctgtacagcaattgcttatgcaaatcttaagacaaagatcaccggagaaacgtatgagcctcgtcgtgcagggcagcttaacgaggagacacaatatgtactggaacactttggcgtaaaagttccgttattgctttctgatcttagagaacagattaaaaatgtggaattgaaagaaagtcaggaaattcagggaagcctctcaatccgtacagcatgggaaaagatgtcagagatgaatactcatacgattccaatcacacgtaatggtgtgctggaaggtgtgatcacaaaaggtgatattgcgaaatcctatatggaagtctatgataacacaatgcttgcgaaggcaagaacacagtaccgtaatattgcagcggcagtagaaggtgaaattgtaacaggaaatgaacatggttatttttataaaggaaaagtaactgttgcagcatcaagcaaagagttgatgacaagctttatcgagaaagatgatcttgttattattggggatcgaattgatgcacagcagtgtgcagttgatctggatgcaagctgtatggtagtctgccagaatgatccgatctcagaagatattctgcgtcaggcagaggcaaaagaaattgtcgttatctggacacagcatgatacatttacggcagcgcagcatatcagccagagtattccggtaagatctttcatgacaaaggatcaactcgtaacattccgtaagaatgattatgtagatgatgtgaaagaagtgatggcacgcaagcgtttccgcgacttccctgttgtagatgaagatggaaagttcttaggtcttgtttccagacgaagacttctcaatgtcagcaagaaacaggtgatccttgtcgatcataatgagaagaaccaggcagtagacggagtggaagaggcagatgtccaggagattattgatcaccacagattgagcagtatcgagacgatcggacctgtatttttcagaaatcagccggttggatgtacagcaacaattgtatctcagatgtacgaggaaaatggtgtcgaaatagatccggtgaatgcaggacttctttgttccgcgatcatttccgatacattgatgttccgttccccaacttgtacaccacttgatgaaagcacagcgaaaaggcttgcagagattgccgggatcaatatagagaaacttgcacaggcgatgttcaaggcaggaagtaacctcaaaggaaagacagccgaggagattctcttccttgattttaaacagtttacagtgaatgatacggtatttggtgttggtcaggtgaattcaatgagcgaagaagagcttgaagagattaaggcaacagtacttccggagatggaaaagacaagacaaaatcacagtctggatatgattttctttatgctgacaaatattattacagaatcttcggaactgatctgttgtggtaatgagtcaagagaaaaaattatcggagcttatgatctggaagataatgcacagaaattaatgctcaaaggtgtcgtatcacgtaagaaacagcttgttccggcacttgtatcagcactgcagcagtaagaaaagctgaacagttacaagaatttttaagataaaaaagtcagaaccgtctccgtaacaggggacggttttcaggaggaaagagaaatggcgaaacaggtatggaaagccggtaatatggtctacccgcttccggcagtcatggtaagtacggcagataaagaaggaaatacgaacatttttaccgttgcatggacaggaactgtatgtacaaatccggcgatggtatacatttccgtaagaccggaaagatattcgtatcatatgattgaagagagcggagagtttgtgatcaatctgacaaccgaacagcttgcacatgcgacagattactgcggtgtgcgttccggccgggatgtggataaatggaaagagtgtcatctgactgcgaaaaaggcagagaagcttacttacgcaccggtcattgaagaagcaccggtcaatattgaatgtgtagtgacaaaaattgagaaacttggaagtcaccacatgtttcttgcagaagtgaaagcggttcaggtggacgagtcctatatggatgagaagggcaaattcgaactcaataagacaggtcttctggcatattcccatggagaatatcttggacttgggaaaaaaatcggaacgtttggatacagtgtgagaaaaaagaagactgttaacaaacgaactgctaagaagatcacaacaaaaaatgaatcaaggggcaagaaatctccagagaaaagaactgcaaataaaaacacaacattcataaagaagggaaaagttaaaaaatgatttcatttgaaaatgactattcagaaggcgcacatgaggaaatcctgcgcagactggcagaaataaataaagaaggaattacaggatacggaaatgattcatattgtgaatccgcaaaggaaaagatccgtcaggcatgtaaatgcccggaggcagacatttacttccttgtgggaggaacacagacaaatcagacagtaattgattctgtacttcaaagctatgagggagttatcgcagctgagacaggacatgttgcatcacacgaggcgggtgcgattgaagcatccggtcataaagtactgacccttccgcagctggaaggaaagattcagcccaaagatgtggcagattatttgaatcagttttatagtgatgggaatcatgaacacatggttttcccggggatggtctacatctctcacccaacagagtatggcacactgtatacacgtggcgaactcgcagagctttctgatatctgtcagcagtaccatattccactgtatcttgatggagcacgtcttggatacggtcttgcagtagaagatacagatgtgacaatggaagatattgcagaatactgtgacattttctatattggtggaacaaaggtaggtgccttctgcggagaggcagttgtatttacaaaagaaaatgcgccgagacattttgtgacactgatcaaacagcacggagcactgcttgccaaaggatggttccttggtgttcagtttgatacgttatttacagatgatctgtatatgaaaatcagtaaaaatgcaatcacaacagctgcgagactgaaggaaatcctgaaagaaaaaggatatgacttctatattgattctccgacgaaccagatctttgttgagatggaagacgagaagctgaaagaactggagaagaatgtcagggtcagcttctgggagaagacggatgagaagcatacggtagtgaggttggccactagctgggcaacggatatgaggaaagtcgagaagctggggaagtatttataaaaaagtaagaatataaataatagcaagtgcagataatatgtagaagcctataaaatgagaatcattatcatgtagaaatattgcgttttgtaaagaaacttgatagaatacatatggttagagaaaactaactgtgtgaataaatcatgtatactcctttgtctgtaatacctgaacacaggcgagggagtcctcagaaaggatggacaactatgaattatctggaaattgaaaaagtaattggaagagaaattatcgactcacgtggaaatccaacggttgaggcagaagtacgtcttgtagatggaactgtagcaagaggcgcagctccaagtggtgcttctaccggagaatttgaggcacttgaacttcgtgatggagacaagtcaagattcggtggaaaaggtgtttcccgtgcggtagaaaatattaatacaacgatcaacagtgcattagttggaatggatgcaggcgacacttatgcaattgatcaggctatgatccaggcagatggaacaaaagataaatcgaatcttggcgcaaatgcaattcttgcggtttcaatcgcatgtgcaagagtggcagcagatgcacttgagattccgttgtaccgttttcttgggggagtgaatggaaacagacttcctgttccaatgatgaacattgtaaatggcgggtgtcatgcactttcttccggactggatgtgcaggagttcatgatcatgccggttggagcaccgtcttttaaagaatgcatccgctggtgtacagaggtattccatgcacttgcaggaatcttgaaagacagaggacttgcaacatctgtaggtgatgagggtggatttgccccggcgctgaaatcagacgaagaagcaatcgagacaattcttgaggctgtgaagatggccggatatgagccgggaaaagacttcaagatcgcaatggatgcggcatcctcagaatggaagacagggacggttggagagtataaacttccaaaggcaggaacagtctatacatcagaacagctcattgaccactggaaaaaactggtagagaaatatccaatcatctcaatcgaagatgcgcttgacgaggaagactgggaaggatggaaaaaactgacagcggagctgggagataaagtccagctggttggagatgatctttttgtcacaaacacagagagactggcgaaaggaatcacactcggatgcggaaattctattctgatcaaactgaatcagatcggatctgtatctgagactcttgaagcaatcaagatggcacacaaagcaggttacacagcaatttcttcccaccgttccggtgagacagaggacacaacgattgcagatcttgcggtagcattgaatacctgccagatcaagaccggagcgccgagccgttcggagcgtgtagcgaaatataatcagttactccgcatcgaggaagaacttggaacaagcgcagtatatccggggaatgacgcatttaatgtgagataacatcagtaaaataatctgacagccagtaaaatccatgcattttataatcccagtgggatgaaatgcatggatttttgtgtatatatttctttgattttcatctagatttttttatctatatgtcatacaatagaaatgtacttgccgtcaggcaacataatatttaaaaatatttggaggatttcattatgaagaaaccggttctggtcattatggcagcaggaatgggaagcagatatggcgggctgaagcagattgacccggtagatcaggaaggacatattattatggatttctcgatctttgatgcaaaacgcgcaggatttgagaaagtcgtatttattattaagaaagaaaatgaagcagattttaaagaagctgttggaaagagaattgagaagatcatggatgtagcatatgtattccaggatctgaagaatctcccagaaggttacgaagttccggaaggacgtgtaaagccttggggaacagcacatgctgttttaagtgcgatcgatgaggtggatggaccatttgcagtaatcaacgcggacgattattacggacgccatgcatttgagacaatctatgaattccttacaacacatgaagatgatgataagtaccgttatacaatggtaggttatcgtctgaagaatacagttacagataacggacatgttgctcgtggcgtatgtgaactcaatgaggcgaaagagctggttggaatcacagagcgtacaaagatcgagaagcgtgacggtggaatcgctttctcagaagacgacggagagacatggacaaccatcgacggagatactcttgtatccatgaatatgtggggattcacaagaagtattttagatgagatcaaagcaggatttccggcattccttgataaaggtattaaggagaatccgatgaaatgtgagtacttcctgccatccgtagtcagtgaccttctggcagagggcagagcaaccgtaagagtgcttgaatccgaagataaatggtatggagttacatacaaagaggacaagccggttgtagtcgcagcggtacaggctttgaaagatgaaggtctttatccacagaaattgtgggattagattatgtgttgtcagttacagaatttgtgaataataatgatcatgcaacatttttaccataagaggaactattcgtataaagatttttgtggtggatgtgttataatcagagataacaaagcaaagataagcaagctgctgaacgcagttactgtgagtggcagcaatttgagcaataaagctcagaggaggaattttaaaatggcaattttagtaacaggaggcgccggatttatcggaagccacacatgtgtagaacttttgaatgcaggatatgatgttgtaatcgcagataacctttacaacgcatcagagaaagctgtagacagagtaaaacagatcacaggaaaagatctgaagttctataaagcagatatccgcgacaaagaagcaatgaacgagatctttgagaaagaagagatcgagtcggttattcatttcgcaggactcaaggcagtaggtgaatccgttgttaaaccactcgaatactacgagaataacattgcaggaactttagttctctgtgatgtaatgagaaatcacggcgtgaagaatatcatcttcagttcttctgcaacagtatatggtgacccggcatttatcccgatcacagaagagtgcccgaagggaacatgtacaaatccatacggatggacaaaatggatgctggagcagatcctgacagatcttcatacagcagatcctgagtggaatgtcgtacttcttcgttacttcaatccaatcggagctcatgagagcggactgatcggagaagatccgaagggaatcccgaacaacttgattccatacattacacaggttgcaatcggtaaacttgagtgccttggtgtatttggagacgattatgatacacctgacggaacaggtgtacgtgattacattcatgtagttgatctcgcagtcggacatgtccgcgcagtagagaaattgaaagagaaagcaggagtttccgtatataatcttggaacaggaaacggatattctgtacttgacatggtaaaagcattctccaaagcttgtggaaaagagattccttatcagattaaaccacgtcgtgcaggagacattgctacatgttactgtgatgcttccaaggcaaaggaagaactgcactgggtagctgagagagatctgaacaagatgtgtgaagattcctggagatggcagagcatgaatccgaacggatacgaggattaagttgagaaaacgattctggaaaatatatcagttgatgctgacagagatcacagattaaatcttgtgtgaatttagtttgaaagaatgaaaaaagaaagttgttgatgaacagggaacgataatagcgtggctctttgtatcatcagcaacttttttgtatgataaaatctgtattataatccgagtcggtttagcttgactgaatgaatggcgtaaatgaatggtaatacggctcttgcatctgacagaccatctgtattatactaatagaacacgattcaatatttaaaatcaaaagaaaatggagatagaaaaatgaagcgcgaagtagatcttaatgaaatttcagacggacgtctgtattcctctggagatatggttaaggtggactgtcatgactgtgaaggctgctccgcatgctgccagggaatgggagattccatcctattggatccaatggatctgtggagattgcaactcggaaaaaaagagaattttgatacactgcttgcaaactatctggaattgaatgtagttgacgggatggtacttcctaatttaaagatggcaggagaggaagaagcctgtctgttcttgaaagatggaagatgttctattcatggatacagaccgggaatctgccgtttgttccctcttggacgtatttatgaggagaatggattcaagtattttatccaggtccatgagtgtaagaagcaggaacgtggtaaagtgaagattaagaagtggcttggaattgcagatcagaagagatacgaagatttcgtgtggagatggcatacatttcttaagaactgtgaagaaggaatgaaggaacttgatgagcagaacgcgaaagtactgacggttgtggttctccgcaacttttatcagatgccttatcaggcagaggaagaagcacagttttatccggaatttgaagaaagactggaaagactgaatgcaatgtttggattttaaaaagggaagccaacaatatgtgaaaggcagcaaaagatggaaagtaacagtagtaaaaaacagatattaaaagaaatttttggatacgattctttccgtaaaggacaggaggagattgtagatcagattttgaatggaagagatgtgctggcaatcatgccgaccggagcaggaaagtcactttgttatcaggttccggcacttctgatgtctgggatcacgattgtagtatcaccgctgatttcattgatgatcgatcaggtgaaggcactgaatgaagcaggagttcatgcagcgtatattaacagtgcactgacagaacggcagattacaaaagcattagaactggcagcggcaggcagatataagatgatttatgttgcgccggaacgcttgttgacaccacggtttctggactttgcatgtcatgcagaactttctatggtgacaatcgatgaggctcactgtatttcccagtggggacaggatttccgcccaagttatgtgaagatcacagaattcatccgccagcttccaagacgcccggtcgtcagtgcatttacagcaacagcaacacagaaagtaagagaagatattcttgaagtacttgatcttgaatctccttatataaatgtatctggttttgacagagagaacctttacttcgaagtaagaccagcgcgtgggaagaaggatgcaattaaggaatatcttacacagcacagagaagacagtggaattatttactgtgcaacaagaaaaaatgtagatgaactctatttggaattgcagaatgccggattctctgtcggaagatatcatgcaggaatggggacagaggcaagaaatgaaagtcaggaagatttcatttatgacaggatagagattatgatcgcaacgaatgcatttggaatgggaatagataagtccaatgtccgttttgtacttcattataatatgccgcagagcatggaaaattattaccaggaggcaggcagagccggacgagacggagaaccggcagaatgtatccttttctattcaccgcaggatatcatgatcaatcagctcctgctggatagtaaagagcagattggagaatacacagaagaagaactccgggtgatccgggaacaggatgttctccggctgcgtaagatgagtaattattgtacgacaagcatgtgtcttagaaaatacatattgaattattttggacaagagacagaagaacattgtgggaattgttccaattgtctagaagaattcgtagagcttgatgtcggagagattgcggcagatgtgatcgagtgtgtgctcgaatccagacagagatacggtatgacaatgatcctttctacactggctggagcgaatacagcgaagatcagaagtgcagggatgaatgaactttccatttatggaagacagagtaaatgttctcagcagaggctgaaagacgtagtttatacactgctcgaacacggataccttcaacagagcgcagatcgttatgcgatcctgaaactgacagaccggtcagaagaattactgaaatcgagagaattgaaacttcgctgcaagaagtcagaacttacagaaaagaaaaagtccggaagtggaaagaaagcgtctcatagaaagggagagagtttcgggaatcttacagataaaagccgagaattattcgaagaattgcgttctgtgcgttattctttggcaaagaaaaaaggaattccgccatatatggtcgcttcagatcgtacattacatgagatgtgtgtacttgttccattcaaaaaagaggaactgcttgaagtacatggtatgggatttaagaaatatgaacagtacggagcagtttttcttgataagattcaagaagtgacagcaggtgataaaaaaggttacggtatatcagaagatgcggatgggacagacgcagttcagaaccagaatcctctagacatcggaccatttggaagcgtagagaattaacagcaaaaaagaagtaaaagaaagaagtgacataaaagtgtctgtaaaaatatttccaacattaaaaaattataaaaaagaatatttgccaaaagatattttaagcggaattatcatggcagcggtctcaattccaatctctatggggtatgcacagatcgcaggtgttccggcggtgtatggactttatggatctgttctgccgatcctgctatttgccatgctctcaacttcaaaacagtttatctttggagtagatgcggcaccggcggcaattgtcggagctgcactggcaacacttggagtgacggcagaatcagcccaggcattgcagtatgtaccattgattgcattgtttacaggactctggttattgttgttttatcttttacatgcagataagattgttgattttatctcaacaccggttatgggtggatttatcagtggtattgcagtgacaattattatgatgcagattccgaaactgatgggaagcccggcggggactggagaattcatagaacttgcagaacacatttttcaggcaatcacaaagataaactggttgtcttttggaatgggaattggagcacttgtaatcttgattgtatccaaaaaactgattccaaagttcccgatggcaatcgttattatgattgccggagttctctcgacaattgtctttcatgtaaaccagtatggtgtagttcttctgcaggcagttcaaccagggcttccgcggcttattttcccggattttacagggatcaatcttacccaggccgtgggaagagcgcttatggttgctgttgtgatcatggcagagacacttttatcagagaacaattttgcatccaaaaacggatatgaactggatgatcgtcaggaaatccttgcctgtgccgcaggaaatcttgctgccggtgcagttggctgctgtccggtaaatggaagcatttccaggacttccatgaatgaacagtatggaggaaagacacaggttgtatccattacagcgggactgaccatggcagttgtacttataggtgcaaccggatttatcgaatatcttccggttccggtattgacggcaatcgtaatctctgcactgatgaatgttgtagagacacatcttgcagtacgcttgtttaaagtaagcagaaatgaattttatatttttattgcagcagggatcggtgtgctgttccttggtacgatttacggagttgtgatcggaattctgttatcctttgttgcagtgattttaagggctacaaaccctccgagatctttccgtggaatgattccgggaaaagaagtttattatgatctagagagaaaccgttttgcatatccaatcaagcatgtgattatttacagatttagcgagaaccttttctttgcaaataacaaagtgctggtttcagatattgaaaacagcatcaaagaggatacaaaggtcgtaattctggacgcatcagcaatcaacagcctggatattacagcggcagatgcacttgaaatgcttgcagcaagtctgaaaaaacgtggaattaagttctatatcacagaacattccagagaagttaacgatcagatgagaaagcttggaatcggacatttgataaaagaaggtgctgtgcgaagaacaattcttgcggcacttcatgatgcggggattgagcagccttgcccattggatattccagaagaagatctcgaaaaacttaagcgaagagaatatttttcccttcctgcagaagaagaaaatacactggaagagtttgcatgggcatttggtgatgatgcagtcaaagaaattgagaaacgagtgctttctattgtgaagcagatccatgagattacagatctcgagaaactttccgaagaaggaatcaaagaaaaactggaattttggaattcacttggagcacttgatgaagatgagttgctccgcagaatggagcttcacttagatgatcttccaagtgatgtaaaagaaaacaaaaaactcgtcattgaattgatcgagcgtagaagaagaaaacttagagatcgtcttctgaaagagcatccagagattgttgagcatattgaagagcgaagagagcggctggagcgaagacttgagaaacagaatccagatgctgtaaagcgtctgaaacactggaaagatgaagaatcctaaagaacaatctgtaagatatgttactgctcactccgttcacagtaacgtagccaaaattcattccaaattgcctgcggcaatggaattttggcttgtatgtctcgggattttggcatattcatgccaaaacacctcgcgggatagtggtgtgtgaacagtaactaagattcttaataaatctttaggattgtcaaagttcccttgtttctgcaaaaaaggaatgctatgattaatatggaagaaaaagtcaggggacaattttgattggctcctgattctaagaatagaaaagaaaaaagggataagcatgtggtctaaagaaacaaaagaagaaaaagaacgcaagaaagaacaagcgttttatgaacattatggcgcgatgggaaaaagcaaggaatccattagaaaagagtgggagagacgcaagaggaatgaacaacgcattcgacgcctcaagagacgaaggagaattgcaattgtattgattctgctcgttgtattagttccggcagtttcaacatttacttattttagaatgaatccgattgtattacggagtaaagtgatcgcgcaggaaaagaaagaaagtatggatctgatgtctaacatccgtttcgttgtcggtggaaaagtgaaagatgtgaagacagaagggaaagtagatacgaataaagaaggaaaatatacggtttactatgtctatggtaaacaaaaagtaaaagctgaagtcgaagttaaggatacaaaagcacctgagcttaaaatgaaagacagttatacaacagaacttccgaaagatatcaagccggaatattttgtagaatcagtaaaagatgcatcagatgtcacacttgaatttgtcggacaggattcctgggagaagaaaggaaaatacggagtaactgttgttgcaacagatagtgacggtcataagacagaaggcaaatcaacactgaatttggaagaggatacaacagggccgacgattgaaggagcagatgataaagaacttgcacagggcgatacgatggacttcaatgaaggggttacgataaaggacgatatggatccggagccgacattggaagtacagggcgctgataaagtggattttgcgacaccgggaacctatgttgttacctatcttgcaaaagaccgttccggaaacgagacaaagattgagcgaaagatcaaagtgaaagagaatccggattggaatgagaaagttgtttatctgactttcgatgatggtccgtcagagaataccggaaagattcttgacattttgaaagaaaaaaatgcaaaggcaaccttcttcgttacaggaaataatcgggaacatgatgatatgattaaaagagccttttccgaaggacattcgattggacttcatacctatacacatgattatgcaacagtttactcatccgaagatgcatacttcgcagatttgcagaaaatatcagatctggtagagagtatcacaggaacgaaatccatgatcattcgtttcccgggaggttccagcaataccgtcagtgcaaaatatgtcaaaggattgatgacaacacttacgaaagcagtgagagacaaaggatatcagtattttgactggaactgtgattctactgacgcaagcggaaataatgtgccagtagaaaaactggtttcaaacgcaacatcctgcacggcaaatcatgttgatattctgatgcatgatacagatgcaaaagatacaaccgtacaggcattgccacagattattgattactatagaagtcagggatatacattcaaaggactgaccgttgatagtgtggcagcgcaccatggagtgaataattagattgcataatgacaaaaataaagggtactagacttggcaaattgctggtgtagtgcccttttatcaaatgcagaacaaaaattatttgcaatattttatagaagaaattattgtataactctgttgacggtatggtaaaaataccatataatataattacagaatatacatcggaggagtttatgacaaactttaaagcagaattttatgaaaagaacggaaataagccagcaaaagatttcatactttcattagaaccaaaaatgaaagcgaaaatgtttcacttggttgatatgttagaaaattatggcaatgaattaagagaaccatacagtaaacatttaggtgacggtatatttgagcttcgttgtaaattaggaacagatattacaagagtgttatattttttctattatgaagggagaataatattaacgaatggttttactaaaaagactcaaaaaactccaccaagagaaattaaaattgctaaagaaagtcgaaaagattttatagaaaggaatggtaaataaaatgagtgaatttagagatttgttaaatgaacaacttaaagatccagagtttaaaaaggaatgggatgacattcaaccggaaatggatgttattcgagcaatgattgataatagaattgctcaaaatctaacgcaaaaagaacttgctgaaagaacaggaatcaaccaagcagatattagcaagcttgaaaacggaacaagaaacccgtcattaaaaatgcttaaaagattagccgccggaatgggaatggctctgaaaatagaatttgttcctatgactgtacggaaatagcctatattgactgctttatataggcttaactgaaacataaattaaatccaatatttgtaaattaacagaggtcggtcttactgttgcaacagtaagaccgacctcgtaactattctaataaaaatattattaaatcttaaagaattatatcttaatcctcatcatctgtctgtacagagtaagtctgtctctttctagccatctcatcgctctcaagatattcatcataagttgtgatcttatcgatcagcttaccgcccggaacaatctccatgatacggttcgctgttgtctgtacgatctgatggtctctggaagtaaagagaagtactccagggaatttgatcagaccattgttgagtgctgtgatagactccatatccaggtggttcgttggctcatcaagaagcagtacatttgctcctgagatcatcatcttggagagcaggcagcgaactttctcaccaccggaaagtacagcaactttcttcactccgtcttcaccggagaagagcattcttccaaggaatccacgaacataagttacatctttttcctcagagtactgtgtcagccactctgtgatattgtagtcattgtcgaattctccgccgaaatccttcgggaagtaagcctgagaagttgtaactccccatttatatgttccctcatccggttccatctcgccaatcaggattttgaagaggattgtcttagcaaattcatttccaccaacgaaagcaactttatcctcacggccaagtgtgaatgtaagattatcaagaatcttttcgccgtcaattgtcttggaaagtccttctacagtgagaacttcattaccaatctcacggttcggacggaagtcaatgtaaggatatttacggctggaaggtctgatctcatcaagctggattttctccagggcacgctttctggaagtagcctgtttggacttggaagcgttcgcactgaatcgggaaataaattcctgcagctctttgatcttttcttcttttttcttgttggcctctttcatctgacgaatcagcagctggcttgactcgtaccagaagtcatagtttcctgcgtaaagctggatcttaccgtaatcaatatcggcaatctgtgtacataccttgttcaggaagtaacggtcatgggatacaacgataactgtgttgtcaaagttgatcaggaattcttccagccatgcgattgcatcaagatccaagtggttggtaggctcgtcaagaagcaggatatccgggtttccgaacagtgcctgtgcaagaagaaccttgaccttctcagaacctgtcaggtctttcatcaatttataatgaagttctgtctcgataccaagtccgttcagaaggttggcagcatcaggttctgcttcccatccatccattgtagcgaactcagcttccaactcacttgctttgattccgtcttcatctgtgaaatcttcttttgcgtaaatttcttctttctctttcatgatttcatacagacgtgcatttcccatgataactgtatcaagaacagggaattcgtcatatttgaaatggtcctgctgaaggaaagaaagtctctcgcccggggagataactacatcaccggatgtcggctcaagctgtccggaaagaatcttaagaaatgtagatttaccggcaccgttcgcaccgatcattccgtagcagttcccctctgtgaacttgatgttaacatcttcgaacagcgcctttttcccgacgcgaagggttacgttatttgcactaatcatttgaaagtctccttgtaaataaattagaattgtgattacgttgttataattgtcctttttcaaatacgtgtgaataagaacataccaatccatatattaacatagaagaaagggtgctgacaagtactgaaatagaaaaatgcatacgaaaaaacagggcaaactgtgtgaaaatgtataagaactaatccttgttctttccattgtaaaaagttataatgttactaagaatctcacaatataaatagcagtagaaaagaggagaaaccatggcacttaagaaagcaacaatcgtactggaaggtggagcaacaagaggcatatttacttctggtgctctggattaccttatggaacaggatatttatttttcagatgtgatcggtgtgtctgccggcgcatgtaatgcagtagattatgtttccagacagccgggacgtacaagagactgtatgattccgaatacaaaagatatgaagtatattaatggagtgaaagatacgatcagggagaaaagtctgatgaatatggatttgatttttgataaatatccgaatgaactgatcccatttgattttgatacatattttcagtcagagatgcactgtgagctggtaacgacaaactgtctgacaggaaatgcagaatatatgacggaaacagaagatcctgaccgattgatgaagctctgtcgtgcatcaagcagtatgccgcttgtgactccgatggtgaatattgacggtgttccgtatctagatggcggacttgcagattctgttccgatccgtcgtgcacagaagcttggaaatgagaagatcatagtgatcctgacgagaaatcaaggctatcgtaagaaagtaatctcaccggcagtgcagaaactttacagacaggcatataagtcctatccgaatgcagtccggacaatcttcagaagaagttttatctataataagacgatgaattatctggatcagcttgagaagcgaggagagatttatgttcttcgtccacatgtaaaaccagtatcacgactcgaacagcatccggatgtcctgcatgcattttatgagcatggatatcatctgatggagcgaaagacagaagaaatgctgaagtatcttgaacagtaataaataaatcgacctgttaaaagaaaaaagaaaagggagttgagttatatgagagagattttagaagagactcagaaccgtgaattatcgtggcttcggttcaatcagcgcgtcctcgaagaagcacgggacgagacagttcctttgatggaacgtatgaaattcgtagctattttcacaagtaacttagacgagttttttatgatccgcgtaggaagcctgtatgatatggcagcagcagacagcaaaaagatcgatcagcgatccggtatgacagcaaaacagcagctggatgcaatttatcgagctgtttccccactttacaaggaacgcgataagacatatgcagagatcaagaaacagttaagtccgtatggtgtctgcggtcttgacttcaaggaactggagcagcaggagaagaagtttgtaaagaaatatttcaaagaagaagtaatgccggtgctttccccacagatcgtagatgcgaaccatccgttcccacatctgttaagtaaagaactgtatgtggttgcgaatctgaagcagggagacaagacgatgctcggaatcatcccgacaccacaatatatttctaatattctctatcttccggggtatgacatccgttatatccgtatggaaaagatcatccttgaatttattgatcttgtttttgaccagtatcagatttcggacaagaactatatccgtgtaacgagaaatgcagatgtatcaccggatgatgaagcttatgcagacagcggagatttccgtcatgtgatgcaagagacacttcataagagaagaaggatggccgttgtccgtcttgaggcagccaattctctgagtaaagagatggagaaatatttctgtgagaaatttaatatccgtccggaatgcattttccgtacaaagatgccgatgaagctggactttatctttgcaatcgctgataaacttccggattcgaagaaaaaaacgcttgtggatgtaccattttctccgcagccgtcatccatgcttacagagggcaaggtgattccgcaaataaagaagaaagatgcactcctttgctatccatacgaaagcatggaaccgttccttcagctgatcaaagaagcatcaacagacccggaagttctgacgatcaagatcacaatctaccgtctggcgaagaaagcacgacttgtagaatatctctgtgcagcggctgagaatggaaaagaggttacggtcctgatcgagctgagagcacgttttgatgagcagaacaacattgactggtccgagcgtctggaagaagccggatgccgtgttctgtacggattcgagggttataaggtacactccaagatctgcctgatcacatacagaaaccgtaccggaattcattacattacacagattggaaccggaaattataacgaaaagacagcgaagatgtataccgattactcgctgatgacaagcagacaagagattggtgaagacgcagcagtctttttccagaatatgtcgatcagtaatctgaatggagtttacaagcatctgattgtttcaccgacaagcctgaaacagaaagtacttgccttgatggatgaagaaattgcaaaaggtgagaacggaagaatcattatgaaaatgaattctgttacggacatggatttcattcgcaaagtaacagaagcatctcaggcaggggtgaagatagatctgattgtgcgtggaatctgctgtatcctcccgggaatcaaaggaaggacggagaatctgcgtgtgacaagtatcgtcggaagatatctggaacatccaagactctttgtcttcgggaaaggagcagatgccaggatgtatatcggttccgctgatatgatgacaagaaatacagagaagcgtgtagaagttgcgtgcccggtttatgatgaagagatccggaaacgtctgttccatcagcttcatgtgatgctctctgacaatgtgaaagcccgcgcgatgacaagtgacggaacatacgtgaagaaaccggtggaagacggagcaagtcttgtgaatgcacaggagacctttatgagagaagcatcacaggcaaaacgtccggctgcagccgctacgccgaagaagaaaaaagaaggattcttaacaactgtactgaagatttttagaaaaaaataatagaaggacgagagatggaggagtatcgaaagatgaaaccgttacagaaaaaagactttggaatgacatcaaagggagcacaggcaacattatacattctggaaaacgaagcaggaatgcagatcagtgtatctgacttcggagcaacactgacaagcgtacttgttccagataaggataacaatccggtagaagtgacacttggatatgatgatgcagccggatatgaagccggacttggaaatgcattcggagcatctgtcggacgtaacgcaaatcgtatcgccggagcagtgattgagatcaatggaacagaatatcatttgacaaagaatgacggagagaataacttacacagcggacttgatttttatcacggaagattgtggaaggttgcagacgcagatgatacccatgtaacatttgagatggacagcccggatggagatcagggatatccgggagcacttgttatgaaagtgacgtattccctgaacgaagagaatactttgatgatccactacgaagcagaaccggatcaggatacgatcatcaatatgacaaatcacagttattttaacctgaacggacataagagtggagatgttctgaatcatacattatggctgaatgcagatgcatttactccggcagacgcaacatccattccgacaggcgagatccgcagtgtggaaggaactccgatggatttcagaatagataagacaatcggaaaagacattgaagcagactatgaaccgctggtattcggaaaaggttatgaccacaactgggtattgaaaaatgaaggcaaatttgataaagtagcagaagtggccggggatgaaagtggaatccatatgagtgtactgacagaccttccgggtgtgcagatctatactgcgaactttcttgacggagagaaaggaagagatggtgcagtttatgagatgagagatgccatttgtctagagacacagtactatccggatgcaatccaccatgaaaacttcccgggaccgatctgtaagaaaggcgagaaatatgatactcgtactgcctacagattccgtgtaaaataattgaatggaagacaaataattaatttatgggaaaatcagtatacattgcggagaaaccgagcgttgcccaggaattcgcaaaagcattgaaactaaatacaaaacgacgggacggatatcttgagtcagacgaagccattgtcacctggtgcgtaggtcacctggtgacgatgagttatcctgaggaatatgatccggcacttaagagatggaacttgcagacactgccgtttatcccggaagaattcaaatacgaagtcattccgtcagtggcgaaacagtttcagatcgtcagtgggatcctgaaccgggaagatgtagatacgatctatgtctgtactgactccgggcgagagggagaatacatctatcgtctcgtagaacaggaagcacacgttgagggaaaaaagcgccggagagtgtggattgattcccagacagaggaagagattcttcgaggaatccgtgaagccaaagatctgtcagagtatgataacctcggagcatctgcatacctgcgcgccaaagaagattatctgatgggaatcaacttctcccgtctgctgactttgaaatatggcaacagtatttcaaattttctgcaaacgaagtattccgttgtatctgtaggacgcgttatgacgtgtgttcttggcatggttgtgcgcagagaacgcgagatccgtgatttcgtcaagacaccgttttaccgcgtacttagcacgatcgatgcacagggacataccttcgagggtgagtggagagcagtgaaaggctcccgctattttgagtcctatgacctttataaggaaaatggattcaaggagcgcaagaaagcagtagaattgattcaatacctgaagacaccggatgacaagtctgtaaatatggcagcaggaatgcaggaacaatcaggactaaactgccggattgagtcgatcgagaaaaagaaagagaagaagaatcctcctcttttatacaaccttgcagagcttcagaatgattgttccaagagatttaagatcagtccggatgagacactgcgaatcgtgcaggaactgtatgagaaaaaacttgtgacttatccaagaacggatgcccgtgttctgtctaccgcagtggcaaaggaaatcacaagaaatctgaacgggctgtcaaaatatccgatggcggcaccgtatatgcaggatatcttgaattttggaagttataagacacttgcaaagacacgttatgtgaatgacaagcagatcacagaccattatgcaatcattcctacagggcaagggttgaatgcattgagtactgtttcatctactgcaaagggcgtgtatgacctgatcgtgcggagatttctaagtatcttctacccaccggcagtttaccagaaggttgctatcgtgacgaagatgaaagaagaaagcttcttctcaagcttcaaagtgctggcagaggaaggttatctgaaagtggcaggcatgccgaagagaaaaacagcgcagacagcagcaaaagacggagggaatgcgtcgaataccgttgatgatacaaacgaagaaaatggatctgattcagcagaccagagtttggacaccggattgttcgaagtgatcaagttattaaagaagggtgcagtccttcaggtcagagcattggatatcaaagaaggagagacatcacctccgaagcgctacaattccggttccatgatcctggcaatggagaatgcaggacagctgatcgaggacgaagaacttcgtgcccagatcaaaggaagcggaatcggaacaagtgcgacaagagcagagattctgaaaaagcttgtgaatatcaagtatctcgcattgaacaagaagacacaggtgatcacaccgacgctgcagggagagatgatctatgatgttgttgatcattccatccggtcactcctgaacccggaacttacagcaagctgggagaagggactgaactatgtggcagaaggttccatcacatcagatgaatatatgagaaaactcgatcattttatcaccagcagaaccgttggggtgaaaggactgaacaatcaatatcagcttagagcctgctatgaaaaagcagcaggattctataaaaaggcataaaatgtaagtcggttctaaccggcagaaaggaattaccatgttagaagcattaacagtaaaagaaaattattcattagaccagacaatcgcaaaagatatcttcaacggagttacttatccgtgggaagtacttccgaagatcagcagcttcatccttgagcttggagctacattgagcgaggacgaatacgagaaacgcggggaaaatgtatgggtagcgaaatctgcaaaggttgctccgactgcatttatcaatggaccggcaatcatcggaaaggatgcagaggttcgtcactgtgcatttatccgtggaaatgcgatcgtaggagaaggagctgttgtaggaaattccacagagcttaagaacgtgatcctttttaataaagttcaggttccgcactataattatgtaggtgattctgttcttggatacaaatctcatatgggagccggatcaattacatctaacgtaaaatcagataagaaacttgttgtggtaaaagccggagaagagaagattgagacaggaatgaagaagtttggcgcaatgcttggagatgaagtagaagtaggatgcggaagcgttctgaatccgggaacagttgttggaaatcacagcaacatctatccactttcttctgtacgtggattcgttccggcaaacagcatttacaaaaaacagggtgaagttgtgacaaaagaagaaagatagttgaaaatagaaaatgataagaatggctcctgtgtgataacatgggagctatcttagacaggaggaataaagcagatgaataaagtagggtttatcggtgtagggatcatgggaaaatccatggtcagaaatctcatgaaagccggatttgaattacatatctatgcaagaacaaagagtaaagtagaagatgtgatcggcgaaggagcacgattccatgaatcgatcaaggattgcgtacaggattgtgatgcagttatcacaattgtcggtttcccacaggatgtagaagaagtatactttgacgggggaaatattttagatagtgcaaagaaaggcgcttatctgattgatatgacaacaacaagtccgcagattgctgagaagatttacgaggaaggtacaaaacgaggtttccatgtgatggatgcacctgtcacaggtggagatacaggagcgaaagctggaacattgtccatccttgttggcggagagaaagaagattacgaagcctgtatgccactctttgaggcaatgggaacaaacattaattatcagggtaaggctggatgcggacagcactgcaagctggcgaaccagatcatgatcgccggaacactgtccggtgtgtgcgaggcacttacttatgcaaaagaacagggactggatccggaagtattcatgaagtccgttgtgacaggggcagcaggaagcaagcagcttgacacattcggaccaaagatcttaaaagatgattatgcaccgggattctttattaaacacttcatcaaagatatgaagcttgcactgatcgaagcgaacagaaaaggactttctcttgatgtactcagtatggttcttgccaattacgaagaacttgagcaggaaggatacggagatctcggaacacaggcattgatgaaattctacgatgaagaacatcgaaatacggaagagtaaaaatctgcgaacgataaccgtaaaaattctgttaagaatcaataaaacaggttgaagtaacagggaaaagaaaatataatagacatcagaagaaaaactgttgaaaatgataaaaagaatcaacaacaggaagacttgaaggagaaaaacgaaaatgcttacagataattttgtgacaatggaaattggaaaagcaaaacacattgcacttgtagctcatgatggaaagaagaaagagttgattgactggtgcgatagaaataaagaagtattacagagccatttcctctgcgggacaggaacaacagcccgtctgatcgcggagaaaacaggacttccggtaaagggatactgcagtggaccacttggtggagaccagcagatcggtgcgaagatcgtagaaggacagatcgatttcatgatcttcctgtgggatccgttagaggcacagccacacgacccggatgttaaggcacttcttagaattgctgtagtatatgacattccggttgcgaacaaccttgcaacagcagactttatgctgaacagcaagttcatgaatgagccttattccagacagattgagaatttcaataagacgattcaggaccgtgttgcggagatgaaataatagaaccccttctttagaatatgaaatagttattgaaaaagtaatattcaacatatttctaaagaagggatttttaatatgaatagattgaattataccataattatgatataattataacaaaatggaggtactgattatgccacaaattataccaataaaagatttaaaaaacacctcagagatttctgatatgtgtcataggacagaagaaccaatttatattacaaaaaatggatatggagatatggtgatcatgagcatggaaagttatgaatctacaataagaagatatgctatgtatcgagatttggagatgtctgaaagacaaattgaaacaggacaagtaaaagacgcaaggatggcactcagagaaaccagggcaaaatatggcttataaattgaatgtaacagaacatgcggatgaattgttagatcatttagtggattatctgattaataatttaaaaaatgaacaggcagcaaagcatctcttagatagcgtggacagtatttatgatagacttgaggaaaatccatttcaatttcctgaaagtagagatttttatctttcagcaaaagggtatcatgaagctattatttcagagatggcatatattattgtttttgatataagagaggatattgtgaatgtactggggatttttcatcaattagaaagctatcagactaaactataaagggctgtgaaagcggaatagtccaaaaacaagggcgcgtgatttttttcacacgcccttgtaatagtattacagcagtcctttttcgcgtttctcaagaagagcatgaatcttatctgttgggctgataacagagctgatcggcacatcatggttcagggaatcaatgatcagtgcgatgaacttactcatatcagcttttacaaagtaaggtttctcataaagttctggtgggagatatgtaaggtttgttgtaataactttactaatatatcccttattataatactcatcgaatttatcaaatccgtctgtgaacagtccgaatgttgtacatacgaagacacgtccggcgttacgctctttcagctgtttcgcaacatcaagcatactttctccggaagagatcatatcgtcaacgataagaacatcctttcctgttacatcatcaccgaggaactcatgggcaacgatcgggttctttccgtttataactgtagagtagtcacgacgtttgtagaacatacccatatcaacaccaagcacgttagagaagtatactgcacgatgcatagctccctcatccgggctgatgatcatcaggtgttctttgtcagctttcagatctggtacttcacggaacagtgcttttaagaactgatactgtgggttaaagctgtcaaatccactaagtggaatcgcattctgtacacgtgggtcatgagcatcaaatgtaatgatgttggatacgcccattgcgtccagttcttccagtgcaagagcacagtccagagactctcttcttgtacgcttgtgctgtctgctttcataaaggaaaggcatgataacattgatacggcgagccttacctgttgcagcagcgataattctcttcagatcctgataatggtcatctggagacatatgattaagatgtccgtttactgtgtaagtcaggctgtagttgcatacatcagtcatgataaaaagatcagtaccacggattgtctctttcaggatacccttagcttcaccagaaccgaatctcggacaactacagtctacctggtaattgttggccttatagtttctgtaaagtggggattctgttacttcgttgatcgtgttctcacggaaggaaacaatataatcatttaccttctgtcccagaggtttgcagctctccatagcaatcagtttcagaggtgcaatcgggagtgtgttttctaacatttcgatgttcgtcattttcttctcctcagtgtgaattagtttttaaccgtcttaagaaatcagacagtaacgtgaattgattaattagaattaacagattaatcattatacatttaacgttataccatttttcaggagaaaattcaaggagggcagggcggagagtggacgataaaatgtattttttgcagaacaagacagaaaataacaaacttgccttttataaggtgcaatggtagaatcttaagtaggaaaatgtgcaggacaaaaaggagtgatgatatgccgaaagtattcaataatcaagtatttattgattttttggcacaattaagacctgatgaacaacatcagtataacagtccatggaatattgcagcagagtttaatattgatatgagctgtccgcatgcttttatcagaagaaagaaatcggagtgcggcaggtagaagtagcttctaagatgatcatagaagctgtagtataagaaaagaaaaataaaaggaataaaaagagctttaatatctgaatgatacgagggtattgtggaagatattaaggctctttttatgtataagggaagttttggataaaaatatttcgtagagtatacaactctacgaaaaaaatgaaattaagttgaatttatagggtttttaaaagatatgaccaattatttgacggtaaatacagcgtttagcttatccatattttgctgtttctgctccatagaaggatgcacataccggtttagagttgtgttaatattggaatgtcctaaaatctcacttaatgtcttcatatcgaatccaagttctacgcaacgggttgcaaaagtatgtcgcagacaatgaaaatgaagtggttcgatctgacattttttcaaagtttttttgaaataatattcgatcgaccgcggctcgcgaaaacttatcttctttccggtgagaatatatgcttcgggatctatcttgtgagattggacgtattgctgcaaaatctcaaacaggaaatccggaatcggaatattacggatggagctttctgtttttggtggagtgataatgatttttgtattatgttccgaatcatctgtgtgatccttaactctgtgtaaagtcttagatatctccaaatattgttcctgaaaatgaatatccttccactgcattgcacaaagttctccaagacgtactcctgtatatagtgcaatcagcgtcccgatgtttttatgtgtcagattccccaataaatagtcctgcaaggcctgctgttcctttaaagagaggatccgaagcggtttcctgacgggcttaacagcacaaagttccgggttacaaagagacagttccccttccttttcagcagtttttaatattaatttgacaacagaacggatatcggtaactgttttcggagccaatccggaaccatcactttttcctgaaagcaacaacttgttcagaaatacttcacaatctttattactgaacgtatagacaaggcgatcaccaatcataggactgatatagtgactgaaaagataatggtatcttacataagtagattccttgctggaaggcttcagccgttccagccagagcagtccataaaaggaaatgttcttcttcatacggacactttgaaaaagacgtggatccatctttctctttgcatcattttgcttttttttaacagttaaataatctgctgcatagatagaacggtatctgggacttccatcttctttgaatgaataaatgtatctggcttcccagcgtccgtcctttcttttgtaaatattttctcctttacgtggcatgtttttctcctccattttgaccatttttttgacggtaaataagtaaataatcacaagatttaattattgctgtgtagcaaaaaattaaaaaatccgccttattattgataaaaatacacaaatttcgacatttctgccttgacttgaacgtattgtgagagtaagatatcaatgattaaagtctttttaaaccgtaaattaactataaatgaattcgtagagttgtacactctacgaaaaaaatacaggggagaataatgggaagaaagcctcaagatcttacaggaaggcagttcggccttcttacagcaatgtatccaactgaacaaagagataaacgaggatctgtttactggcattgtgtctgtgaatgtggaaacacaattgatgtgccggcagcaggattgattcatgcacacaatcgaagctgtgggtgtttaaaagagcaaaatcagaaagcaattgcagatcgcagacatttggtagatggaacttgtgtagaagtattagagaagagaaaaaaacgcagagataacgagagcggttttcgaggtgtgttccgattgaagaacagcaatcgataccgtgtcgatatcggttttaagggaaagcgttattatgttggtctctttgatgattacgacgaagcagtccaggccaggcttaaagcggagaacctgatacacaatggttttattaaagtatggaaagaatggaaccaaaaggaacaggaagatccagagtggggcaaagaacatccgctggtattcaatgtcagaaaagtggacggagagttacaggtagaagcaggatgcagataaatcaatttacaggaaaaagggaaaaggagaaaggtatgaagggtattatcttagcaggtggatcaggcacgcgtctgtatccgttgaccatggtgacaagtaaacagcttttgccgatttacgacaaaccgatgatctattatccaatgtcagttcttatgaatgcagggattcgagacattttaattatttcgacaccacaggacaccccaagattcaaaagtttattaggagatggacaccagttcggagttgacttgacatatgaggttcagccatcaccggacggactggcacaggcatttatcatcggagcagattttataggaaatgattctgtggcgatggttcttggcgataacatctttgccggacacggactcaagaaacgtctgaaagcggcagtcgataatgcggaaaatggaaaaggtgcgacagtctttgggtattacgtagacgatccggaacgttttggaatcgtggagtttgataaagaaggaaaagcaatctcaattgaagaaaaaccggaacatccaaagagtaattactgtgtaacaggattgtatttctacgataatcgtgtggttgaatatgcaaagaacttaaaaccatctgcacgcggtgaactggagattacagatctgaaccgtatttatctggaagaaggtagtctgaatgtagaacttctcggacagggatttacctggctggacacaggaacacatgaaagtctggtggatgcaactaactttgtaaaaacagttgagcagcatcagcatcgtaagattgcatgtctggaagagatcgcatatctgaatgaatggatcagtaaagatgagttgacagaaatttatgaagcgatgaagaagaatcagtatggacaatatctgaaagatgttatggatgggaaatatagagaacatctctactgatttgaacgaatactgaaagtgagataaagaaaaactcgaggtcatttccataggaattgaaaacgagagagacgaggagaaccaagaacatgaacattattgttaccggaggagctggatttattggaagtaactttgtattccatatgttaaacaaatatccagattacagaatcatctgtctggataagctgacttatgctggaaatctttccacactggaaccagtgatggacaacccgaatttccgttttgtaaaagcagatatctgtgacagagaagcagtaaataaattgtttgaagaagagcatccagacgttgttgttaactttgcagcagagtctcatgtagaccgttctatcgaaaaccctggaatctttcttgagacaaacatcatgggaacacagacactgatggatgcatgccgcaaatatggaatcaagagatatcaccaggtatcaacagatgaagtatatggagatcttccgctggatcgcccggatctcttctttacagaggaaacaccgattcatacaagttcaccatacagcagttctaaggcaggagctgaccttcttgtactggcatatcaccgtacatatggactgcctgtaacaatcagccgctgctctaataactacggaccatatcacttcccggagaagctgattccgctcatgattgcaaatgcattagcagataagccacttccagtatatggagaaggtctgaatgtgcgtgattggttatatgtagaagatcactgcaaagcaatcgatctgattattcacaatggtcgtgtcggagaagtatataacgttggtggacacaatgagaaacagaatatcgagatcgtaaagatcatctgtaaagagcttggaaaaccagaatcactgatcactcatgtcggagaccgtaaaggtcatgatatgcgttacgcgatcgatccgacaaaaatccacaacgaacttggctggcttcctgagacaaagtttgaagatggaatcaagaagacaatccagtggtatctcgataaccgtgactggtgggagacaatcatcagcggtgagtatcagaactactatgacaagatgtacagcaaccgctaagtgaccggaggaagaaacagaatgaagtgttttgtgacaggtgtcggaggccagcttggacatgatgtaatgaatgaactgctgaaaagaggacatgaaggtgttggttctgacattcaggaaaactacagtggtgtagctgacggttctgatgtaacgaaagcaccgtatgtatccttggacattacagacaaagaagcagttgaaaaaataatttcagaaatcaatccggatgctgtgatccactgtgctgcatggacagcagtggatctggcagaggatgaagagaaacaggagaaagtacgttccatcaatgcaggtggaacacagaatatcgcagaagtctgtaagaaactggactgcaagatgacatatattagtacggattatgtatttgatggacagggaacagagccttgggaaccagattgtaaagcgtatgctcctttgaacgtatatggaaagacaaaattagagggagagttagctgttagcgaaacattggagaaatacttcattgttcgtatcgcatgggtatttggtctgaatggaaagaattttatcaagacgatgctgaatgtaggtaagaaccacgatacagttcgtgtggtaaatgaccagattggtacgccgacttatacgtatgatttggcaaggcttctggttgatatgaacgaatcagaaaagtatggatactatcatgcaacaaatgagggcggctatattagctggtatgactttacaaaagagatttatcgccaggcaggatacacaacagaagtacttcctgtaacgacagcggagtatggattgagcaaagcagctcgtccattcaacagccgattggagaaaagtaagcttgtagaagcagggttcaaaccattgccagcctggcaggacgcgctgagtcgttatctgaaagaaatagaagaatagaaacaaagtgggagttaagtgtaatgggacagattacagttgagaaaaatgtaggtggaattgaaggtctgtgtgtgatcactccggcagtacatggggatgcacgtggatacttcatggaaacttacaatgagaatgatatgaaagaggcagggattgatatcaagttcgtacaggacaatcaatctatgtctacgaaaggtgtgctgagaggactgcacttccaaaaacagtatccacagaccaaattagttcgtgcgattaaaggatctgtgtttgatgttgtagttgatctacgtgccggaagcgaaacatacggaaaatggtatggaatcgaactgacagaagagaataagaaacagttcttgatcccgagaggattcgctcacggattcttagtcttaagtgagacagcagagttctgctataagtgtgatgatttctatcatccgaatgatgaaggcggaatggcatggaatgatccggagattgggattgagtggccacaggtgaaaggggagtatcagggaactgcatctgcagagggatatgaacttgaggatggaacggagctgaatctgagtgagaaggatcagaagtggctaggggtgaaggatacattcaagttctagtatcagtaaagaagaataggagtgtgaaataatgaattatattatttttggaggatctgggtttattggtacacatttgattcatcttttaaaagaaacacatctagatgataatatttacgatttagatatcgtaatgcccggagaagaaggagtagtaccaggaatcgttgagaagaatgaaggcgttaagtatgtaaggtgtgatgtgagaaaaccaattgatgtggaaattgaaactacaaaagatgatgtagtatttaatcttgctgctgtacatagaactcctgggcataaagatattgaatattttgaaaccaatattcgaggtgcggaaaatgtaactgcatgggtagagagtaaagaaattaagaaaatgattttcacaagttctattgccccatatggtgcagctgaagcattaaagaaagaaacgacacttccaacaccaaatacaccgtacggtatttcaaagctggttgctgagaaaatccatgaaaaatggaaagaaaagaatcaaggtcagttgattatcgttcgtcctggaattgtgtatggaaaaggtgagcatggtaatatgacacgtttgtatgcaggtataaaaaagcattatttcttttatacaagaaaagatactatcaaagcgtgtatttatgttaaagaattagttcatttctttttatgggcacttgagaataataaagagggtgtatggaactgcacatttgagccggcttataatatagagcaaatttgtgaggcaatgaagaaggctacaaggatgaaacgatttataccaactgtaccaggaaagttcttattatttgtggctaggatagtaggaccaattggtggaaaagcagttggaattcatccagcgagagtgaagaaactaatgattagtacaaatattaatggagaaaagctgaaaaatagtgggtataaatttcattggactgtggaagaaagctttagagactggtttgaagattgcaatagaaaatatttgaaatagaagcatcagaggaaaaataaatgaaagaaaaaaatatatgtttaatcacattttccaataatgccgaccatcaaaatacagtttacagtatgtttaatgctttgtatccggagcatgaagtatatacgattggaattattaatcctaaaactaatatagcacctcacacaaagaataattattatgtgaattgtccagatagaccaggcattggaaaaggaacttttaatttgaaggttttatttgaaattaagaatattattgatgctaataacattgacattatttatttcgaaagtcagcatatttggaatatgtttataatgttgctttgtccttttaaaagaacggttgtagcagttcacgatgtaatacctcatgatggaaataaagctatgaccttagcaaattatgtgacctgtcatttgtcaaatggtgtgattttaagaaactatatgtataaaaatactttgtctcaaaaatataaaatcaaatcagaaaaaatcacttgctttgaactttggagagattatccagaaaaagtagaaccatcatattctaatcaattcttgtattttgggagaataagaaaatataaaggatttgagttgtttgcaaaaattatagaaaaaacacctcatattaaatatcgaattgtaggagaagcggatgaagaatctaagtatcttgtagattatgttagaaattttgaaaatgtttccttagttgaatatgaagtttcggattcacaaatgattgaagaattcaagtgtgcagattgggttgtgttaccgtattctaatgcaactcaatctggagttataaccgatgcatgcagatatgctagaccagttatttcatttaatgtaggtgcaattaaagaacaaatagaagatggtaagacgggatttttgattaaagctggagatattgatgggtttgcgaataaagttaacgaagtgaataaattttctagagataaattgagagaattttctgaaaatgcatattcttttggatataaaaaatatgcagcaaaattttttgcagataaattttttgcattaatgcagagaatttaggaaggagatataagatgattattactaaaacaccatttcgcatgtccttttttggtggcggaactgacatggaagattattttgaagaaaatggaggggcggttctatccactacgtttgataaatattgttatgtaaatgtaagacacttacctagattttttgattattcaagcgaactgacctatagcaaaatggaaagggtaaaggatacagatgatataaaacatccagcaattcgtgaggcaatgaaatttcttgatatgcaagaaattagattgacatatgaagcagatttgccggcacgttcaggtcttggaactagttcatcatttgctgttggtatgttaaatgctttttacgcattaaaaggaaagtatgcagataagaaaaaattagctgatgaggcaatttatcttgagagggttttgtgtaatgaagctggaggatggcaagatcagattgcggcttcatttggtggatttaatcgaattaattttaatactgatggaacatatgatgtattgccagtgattatttctcctgagcgcaagcaacatttaaataataatttaatgatgttttttacaggatttacacggttttcttcagaagttcaaaaggcgaataatgttagtggttcagaagaaaaacgtgtaaggctaaaaaaaatgtatgaacttgttgatgaagcagaaggtgttcttacaaataaaaatagggatttggatgattttggccgtcttcttgatactacatggagactaaaaaaagggactggtggagcaattagcactggaagtatagacgaattgtacgaaaaggggatttcagcaggtgcattaggaggaaagcttcttggtgcaggtggaggtggctttttggtgttttatgtacaaccagaacatcagaaagatgtaaaagaagcaatgaaagatcttatgtatataccgttttcttttgaagatggaggaacaagggttatacattacagcccagagaaatttgaaatcagaggagataaataatgaacccattaaaacaagtggatattttgattaaaagatatcctgaattagcttatcagcgagacaatattatagcagcctataatattatggaaaaatcctattctaataagggaaaactgttaatagctggaaatggtggatcagcagcagatgcagaacatattgtaggggaattaatgaaaggatttgaaaatcctagaaaattagacacaggttatattaaaagaatggaagcaatagatatagagatgggaaaggttttaggagataatcttcaaggcggattgccagctattgctcttgacggacatctaagtttatctacggcatatatgaatgattgtgaacctcttctctgttttgctcaacaagtaaatggatttggtaaagagaatgatgtttttttagctatttcaacatctggaaattcaaagaatattctttatgcagcaaccgtggctaaggcaaaaggaatgaaggttattggtcttactggagtaaatgatagtaaattaagtgatatggcagatgtgactattcgttcatcagagaaaagaacttatatgattcaagaacatcatctacctatttatcattgtttgtgtttgatgcttgaagaaagattttttggaggaaataattaatgaaggttttggtaacaggtgcaggaggtatggtgggatcacatatggtggaactattgtacaagcgtggcgatgaagtagttggaatctggcataagaataagaaaaatattgaacagattactcttcctataaaatttgttcaatgtgatttgagatatgctcaaggaatagatgaattaatcatggattttatgcctgaacaaatatatcatcttgcagcacaatcttatccaactgtttcatgggttagtcctacagagacgattgatgtaaatgttaattctacaattaatatttacgaagcgataaaaaaagctagaaaatataaagatagtaagtataatccgattgttatagttgcgtgttcttcggcagagtacggcgaaactttaaatcagatgcaaggattaggtgaagtatatgtcaaagaaacggcacaattacaaccattacatccatatggcgtgagtaaggtaggacaagatttaatttcttttcagtattttatgaatgatcatatacgttgtatcagagcaagaatattcaattcgacaggtacaagaaaggttaatgatgtaacatcagattttacaaagagggctgtagaggctgaaaagacaagtaattgggaattgaaagttggaaatttggatactaagagagcaataatggatcaaagagacttagttaaaggacttatgttactcgctgaaaaaggaaaagctggagatgtatacaatatttcttcagaatatgtttatcaaatgagtgacattgtaaaaatgatcgaaaaacaagttggacataaattagaaattaaagttgatgagaagttgattagaccaactgatgaaaaaattattgttggagatattacaaaactaaaggaagatactggctggtatcaagatattagaatggaacaaacaatttctgatatgttagattattggagaaaaatactttagttaaaaggagctaaagatgaataaaacaaaagtgttggcattatatttgccgcaatattatgatacaaactacaataatgattggtgggggaataattatacagagtgggttgcttgtaaacaagcaaaaccattatttaaagggcataagcaaccaaaacttccaatggataatcatttttatgatttgagtaataaaaatgaaatcttatggcaaacagaattagcaagaaaatatggcatagatggttttgttatatatcaatattattcatgtaataattcgaagtatgggaaaaagaatggcaaattgggctctatgttattaaatgtacctactgagattattagagataatgatgatatagatacaaaatattgtttatattgggctaatcacgattggagaaaagcatggtttggacaagatgaaaccatgctttggccacaattatatggagatgttactgattggaaagagttctatgagtataatcgcaaatattttttagatgagagatatattaaaattgataataaaccaatttatatcatatttgcagattggcattttaaagaaattgattcttttatagattgctggaataaatgggcaatagaagatggattcaatggaatattttttgttaaaacggatgatgcacattccaaaaaaggattaggtaagtttaatgcaagttatagaagagaaccattctatacttttggtaataagttaggaatattaggaatgggcaatcgattagtaaaaagaaaaggactacctgttcttaataagattttaagtaaatataataaaggaattgttagttataaatatgattatgaaaaattatggaaatcaatatgtaaaaatgatttaaatgagagttctattcctggaatgatagcagattgggataatacagcaagaaaagggtataatggacaggttttaacaggagtttctattgatatatttgaagagtattttgaaaaactattaaaaaaatcaaatgaaaacaatgttccatttattatgataaatgcatggaatgaatgggctgaaggggcatatctagaaccggatacaatgaatggctataaatatttacaagcaattgaaaaggtaacaaaaaaatggttatagttatattagcacttttgatttatatattaaaatgtaaatttgaaaaattatctccgaaaggtagaaataatatattaatttgttttttgtttgggatatttattatttgtatatttaatctttatgtggaatattgtgttggatggaaatatggcgtaccatttgatgatgattctagttggatttttaaagcggctgaatcaatgaaaaaagggtctaaatggtctgaattatatttacttgtgtcaagaagctgggatctgacaaatagagttttatcaccagctaatataggacagtatatatatgcaaaatttgtaagcctatgtttgtattatccagttattattgatttgcatgtaaatatatacatattatatttaatacaatttacattgattactatagctattattgatatgatacttgaacttgaaggcattggcaaagcctattataaaaagattccatcaaaatcgatagtattttttctgatattattttatccgatgattatttttaacgctgggaaaatgcttagagagactatttatacttattttatgtttgaaatgtttgcttgttttttacattatttgaataatgcagaggccaaagaaaaaatgaaaaaaataataatatatgctttattaatgttattatttcgaccgaattcagtaatgattgtggtccctttgtttatttggatgtttttgggcgatgaaatggccgtaataataaatcttattattatgggtattgtgacattaggaacattaatagtaaattggattatgcaaatggttggttggagctattcttttggaaatgtaagtatatatgagacaatccatttggttttattccctaatatctttaatcagattaaagactttatgtatatttttagtgaaccatcgtggcaaacagttgtatatttctttcagtcgttttggaacattatttttattgttatcatggtagttggaatggtgtttgctaaaaataaaaaatatactttggtatttttgacgatgcttctaaatgcattatttatatattctattgcatatggtgtagaaaattttacaccaagatataaattaatatatataattcctcaaatatattttgtttataccggattatgttttatgaaatcaaaatttaagttgaggtgatatatatggacagaaggagaaattataaaattgatttgttgaaaaccttagcaatgtttatggtaattgtcgaacatatgttgatttatacaaatttgaaggagaattctgtaaataatagtaatatatattgggctttgcgatgcatgtgtaagatgaatgtcaatttatttataatatgttcagcagttcttttgcgaaatagagaattcaaattttgccgttttattaaaattattttgtatacagtcattatatcaatattatctatactttgttatttagtaattggtgatgaaagtattggaaaaaaagatattattaaaagtttttttccagttttaagtaactctttttggtttattacttgttatttgggattatatcttttataccccataattaataaattcatagatggattcaaaggagtgaaaaatcaaataataatagccttattgatatattttgtactttttatgtatccgaattgttttttggtaaatagtattgttaataatggcggaagatcaattgtttggatgatagtattatatatttgtacaaacgcgattggaaatctaaaaataaaaacaatttatttgcagatagtattttggggttcatttataattcttttattttctacactggcgttaaatgaatatgggatatcgaatccttttttaagcaatgaatctccacttgttttatgtatgtcaatatctttttttatgatattatcaaaaaaacatattgatgtttgcaataatagtatacaaagaattttcactattttatcttcagctacattgaccgtgtatttagtgcatgaaaatatatgtagagatataatatggaattatgtgaatgatttaagcaattattattctataatatattttttgattccaataataatttatttttttggaattattgttagtctgctattaaatattattacaaatccaattatgaaaacaaaaagcctacataaattaagtgattttatagattcaatatatgacgaattatgaggtgataagaaacgatgaagtttttaagtatttcgcctgttagtccatatgatgatatagggcatgcaggagggaagacgtataattattatttaaaaaatatatcaaaaaaaattgatgttaacgcattgctgttttgtccaaagaatgaagaagataaaacggatctttcggaatatcaaattgattataaaaacatctttactagtggaactattatgactaatattagtcatatcattttagatacagtgggttttgccatttataacaataggatgttttcattgttcaaatattgtaaaatagttcaatatttagacaaattgaagaaacaaaatgattttcctgagataatcgaattggaatggacaaactttgtttattatgcgtctaaattacatgatagataccccaacgtgaaaattattgcatcagaacatgatgttaattttcaaagtctaataagaaagaatatgggttctaaaagattagaaaaactaaaagaacaagaaattaatgcattaaattgttgcaacaaaatattagtacaaagtaacaaggataaggttttattaacagaagaagggatttcagaagaaaaaatactagtgatttctccatattatcataacatgagtgatatcgtgagaaattcgaataaaaaagatatattattttggggagcaatgtataggccagaaaattataaagcagcgatatggtttataaaaaatgtaatgccgttgttatcaagtgaggatgttagatttgttgttgcaggaaataaaccacctgaagagttgaaaaaacttgaaaatgataaagtgattgttactggatttgttgaagatgaaagagaattatttgaaaagagcatgtgttttgtatcaccattattaacaggagctggaatcaaagttaaaataattgaagctttttctgctggaattccaattttgactaattcgataggaatagagggaataccagctacgaataaatacaattatatccattgcgaaacagcaaaacaatatgccgatgcaataaagaaaatacagaatggagaaattaaagagcaacgtttattaaaaaatcaaaaggaattcatgaaaaatcattttgatttagatacggcattaaatgaatatgtagaaatgattaagactctttgataaagaaaaaatgaaaaatatattaatatcaacaacaagacagtggaacccaggtgatgaatttattatgatgggatcattgaatataatgaaagaattgtatggaaatataataaatcctattattttcaatagaaatccagatattagaggaggcgcaaactttagaaatagtacaagaaactataaatttagttataaatgggacaaatcgacatttaaggggaaaggtggtcttcatgaattattcagaataggtcattatgacaattcctggaaggatgatatgaatgtgtcgaatattgatttggctgtatttgcaggttccccagaatggtatggaaaaagattgaaggcgatgtatcaggcgattgaaaaaggagacatacctacaattttcttgggattaggtgcaggtgatagtatagattttgccaaatcagatgccatagttgatagagtattaactatggcaaaggttattatgactagagataagcaaacagaaaaaatgctaaaaaaatatggtgctatgtatatgccatgtccggctctttttgctgcacctagtaataaaatagttaaagaagttaagaaaatcggattgatttatgctacacatgagaccttaaaaggaaataatgtatcaaaatccatgcatgattatattattgatttgtataaagaattaaataaaatatatgatgttgaattggtttgtcattatattgatgagatagataaggcaaaagatgaatttccagatatagacattaactattcatatgattctaaagactatatagatatttataataaatttgatttagtaataggtgggagagttcatggaattggaatgagcgcatcactgggaatcccgggtatcatgataaaacatgacagcagatcaagtactacagatggatttttggcaacttctataaacattggaacttctgtaaatgatattgttgagataattgaggcaaaaagtaaaaatattgaaaatgagtcaaaaaaacttaatgaacataaaaaggaaacaatgtcaaaatatcttgagattttaaaagaaagattacatgattgagggtgaaatatggatggtaaatcaaaattagcaaaaaacactgttatatatgcgattggtaattttggaacaaaaatattatcttatattatggtgttggtttattcatattttataactcctgatgatatgggatactatgatcttgtattgactactatatctatgcttcagccattaattatattccaaataaatgatggcgtttttcggtttttaattgattcaagtgaaaagaaacaaaagtcaattattggaaacagtttgaaatttctgtcttttacagcagttataacagaaatattgttttgtattttttgtggattttataatattaagtatgcggtatggataggactattattaatttcaacgatgttttttacactactgcaagatataatcagaggacttggaaaaaataaagaatatgctttttatggaattcttaatagtttgataatgctttttgcagaaattataggtcttgttgtattaaaactgggagtagaggcattaatcatatctaaagtattagcgtatatcgtttgtattatatttatgattgcaaaaaattctgaaataaaagtttcttttaaagagaaatttaattatagtgaatttaaaccagtgataaaatattcatttccgcttgtaccgaatacggtttgttggtgggtagttaattcttctgatagatatattatactgttttttttaggaactgcttacaatggaatttactcaatgtcaaataaatttcctacaatattgactactatcacaagtattttttatttagcatggcaagaatctgcaattaaagagtacaattctcctagtagagataagttttatagtgaaatttttaaaaaatattatgtactgttatttactttgtgtctgtgcgcgataccagctacaagatttgttatagaactatttgtatctgaatcgtataagcatgcttggagatttacagggtttttatatttaggtgctgcatttagtgcattaagtagttttttgggaatggggtatcaaatatcaaaagaaactcaacggagtattttgacaacaatttttgcagctgcattaaatatcattattaatataagctgtgttaaattaataggtttacatgctgcaagtctttccacttttttagcatatttgtttttaatgactattaggatacaacattcaaagaggtattttaatctacaggttaattggctaaaatttattttgttatttgctagtgtgataatatttatgtatttaacatttgtgattcctaatttatggctatgtttaatattagaaataatagcaattatcattttaatagtattaaatcaatctttgattttacctatgcttaaaaagcttactattaaatttaagtagtggtgtaaaagtactaatgatgcagcaaatatataaaagttaatgattaagtattttgtgaagaatggagacaagtagtatgaaagtagttattatggctggagggagagggacaaggatatcagaattattcccagatattccaaaacctatgattccagtatgtggaatacctgttttagaaagagaaatttcttctttaaaagaacagggatttactgacattattcttactgtgggttataaagctgaaagtattatgcaacattttggtgacggtagaaagtacggggtgcaaattgagtactttgtggaaaaagaaccattgggcaatgcaggtgctttgtttcggataaaggataaacttactgaagattttttattattgaatgcagatgcaatgtttaatgttgattttaatcggtttgtgaaattccataaagcacataatgggttggtaacattgtttactcatcctaataatcacccatatgatagtggattaattgttgcaaacaaagagaaaaaagtagagcagtggctaactaaagaagataagcgacctaagtattatcagaatagagtaaacgctggattacatgttatcaatccagaagcattggatctgaaagtgactactgataaagtagatcttgatagacaagtgttaaaaccattgtgttcttcgggaaaaatatattgttatgatagcccggaatatgtaaaagatatgggaactccagaacgatatgagactgtttgcaaagactttgaaaatggtactgttgaagcaagaaatttaaagaataagcagaaggcaatatttttagatagggatggaacaattaataaatatgttggttttttaagaaacatagaacagttcgaactacttagtggtgtttccgaggcaatccgaaaaattaatcaatcaggatatctagcagtagttgttacaaaccaacctgtaatagcaagaggggaggtaacctatactgaattacaagaaattcataataagatggaaactattttaggaaaagatggagcatatctagatgggatttatttttgtccacatcatccagataaagggtttaaaggtgaagtaaaagaattgaagataaattgtaactgtagaaaacctaatccaggactattgttacaagcggctagtgattttaatattaatttagaacaatcttggatgataggtgatgggaaaaatgatattcaagcaggtaaaaatgcaggatgtaagacagtacttataggagatgatgaattcggtcaagatattacagtttattctttgttagaatttgtgaatcagatagtatgttgaatattcttgtgttgcctgatcactaacttcccatatttttcctactcagcataaaaatatgtaagtgcctcaaaacatgacgcactagtattacagcagtttttctgctatactagccgcatcatcaatggaggcactttttaatgtctctttttcaaatggcattgttctggaaggtcttcagactatggcaataaccgattaatcacagtcgggtcttcctgatgatgattgtttggcatttctgaaagtagatattttaaatattcgtaagtgcctcaaaacatgacgtagtgaccgaccatccagatcttgatatactgtgaaaaacagaaatcaagggagggttatactcatggcaaaaacaaatcaagaaactgtcacagcgtttggagaggttgtatgttcatcaaatactgcacacacttattgtgtagcgaacaatactaaaaatcggactacatcgaatgataatcgtctgatgatttactatcaaggaatgaaactttacatcccagatgaatttcagtcagatgcacttttacagcttttacgcacattgaaaaagttatgatgaaacgcattgcaggaggcgcaagccgcatttttcttgcctgcggcagtacagatttccgaaaacagatcccaggattagttgcaatggttactcttaattttaagttggatccgtataatgatgattatgtctttatcttttgtaacagaaagagggatgccataaaagtcttacgttatgatcgcaatggttttgtgctggcaacgaaaaagctgttggacgatatgaaatttcaatggccgagaacacctaatgaagtaaaagagattactttccaacaagtcgaatggcttctgcagggattgaaaattgaacagaaaaaggctcatcatcaggtaaaaataaatgtaaaaaactgttgcttttgatcttcatgataacgctataaaaagagtgtaaaaagcttataaaatcggcattttttagtgctgtagttcctgcaaaacagtagagaaataccgtgaaaaatggtataatgttcttatcgaaaatgaaaaggaaaatggcatgacagaacacgaagaattactgatgttgagagctcttgcagcaaaacaggcgttgtatgatgcatacgtggaaagcgagcgttcattggatgaaatcattgaattgattctgcaatgcctctcagttataatgaaatttcatgcagagataccagaaaaaggacaatagaaactggagataaaatatgataaataaggaagttacaagacacattagaactcatacaaaacactcaagtgaagaccaggcagcggtacattttttagaaaatcatttaaaatcagatggaaagattaatctggattttgcagctgttgataaatggccgaatatagatggcagatttgaatttgttccgcatccggatatttcaagaagaccagaacagaacttttttgtccagattaaaggcacacatcaacaaaaagaacgtgatggtaaaatagtttatcggttaaagagtcttgcatttcctgcatttatttatgctacagtttctcttgatccgggaattctttttcttgtaacggatccagatgagcgagggaaagaaagagttttctggaaatatatgtccactgaatttgtgcattcaattgattatagcaaagatagttgtatagtggaatttggtttggatgatgagattaaatatacggatgaaagtattgatcagttctgtgaaaagcttgagaaaattatagagcatcattcatttgtatcaaatctggataaaagagggtattcgagaaaagatatccagagcataatggaagagtgcagtattaggatttcagattgtattgctaattttgatatttacaatgaaacaagagatgacctttccaaaaatatgctaagaatgttgaaagagttatgtgtagcggcacttttaatgaatgcactttcaataaaagctgaagagatgagcctgcagctggcatgggaatatgcgttgctggatattaaaacaaagtatcttgcttatttttataaaggattagattatataggttatcgcacgccagagattggacaatcagagcgactgatgctgaaatattatgattttatgtggaaaatcagagaaatggcaaaacaaaagtttaacatagacattttggaaaatcttgaagaatttccgcgctgtataaatggattggatcaggaatattacgaaatgatagcaaaagcagtagattcggtcgaaattattcatccattagtaaatgtaacaagattttatgtacataagaaaacagctttttatgtaggggcggatagatactttgagcttactttgcagcttgcaagcatttatgcaacgaagttcaaccggattacagtatataccagacaggatatttcgactaattattcaattcagattgcatattctgatgctacagttaatttatggggagttgggtccaagataaaagttgtaaccgattggaaagtatcaatagagccttcctgtctcaataaaatcggaaaaattctcaagaactctactagaatcaactcacaatatggagaatatgacgcactaatggaatttcttacagtaacaggtatgaatctgttggatttgattgatctgagagaagttgagtttgacaggataattacagacatttacgaggatgcaaatacaaaatattttaaagaaattttgcaggaattaagagtggattattccagagattcaatggtcaaaggccgaaatgtgattagatatctgttgctgcatttacgggaagaactattagatagcgtaattgtggaaaaaagatatccaaagtatttaagtgataatttggaaatttcgaaaaaatgttatccgtttgaatcgaatccttacatttctaatctgccagataccaatagtagtgataaaagcagacgtgattcgatcatcagaataggaaataagagggcttttgatcgagccttcccgtatttaaaggttcaggatgagacgatccagacaggagaaatttattttgaaaaagatacattggtaacagataaggaaataaaatcattcaattcaacattggattcatgggaacggggagaaggaaaaagtctggttcaaaaagatgggtatgtttatattgatttttatgaacggacgactttacatattttgaggtatcttctaaaattatcaaagtgtgaaagaaataaagagcaacgtactataaatcaaagatttttgaaagaaaatcaggatttgataagagatgaagtgaaagaacaggctataaaaaatgcatttataaaatcgaaagtcttattaatttatggggcagcaggaacaggaaaaacaactcttatgaattacatttcaaatatgctggaaggaaagcgaaaattgttcctggcgaaaacacataccgcactggaaaatctgaaaaggagagtagaagatcaggagaatgtggagttcaaaagtatcagaagttttggctcttcaagaaataatgggaattatgacgcggttttcatagatgaatgtagtgtgattgataatcggaatatggaaaagataattaacaaaatcggggaaaattcactgttgattttagctggggatatttatcagttagaagctatagaatttggaaactggttctattatacaaaagaaataatccttacgaaaggtgcaaaagttgaattgtctaatacttggagaacagatgatcagaagcttattgagttatggaatgaggtgagagagcataagccgttgataactgaaaaaatggctatggatggtccattttcagaagagctcggggcaaaccttttgaaaaaagatggatataaagataatgttgttctgtgccttaattatgatggtaaatttggattaaataacatgaacaattatttccaatgtgcgaatcatgaaggagaggccgttgtctggggggaatggatatataaaaaaggtgatccgattttgttcaatgattctaaacgttttccagtactttacaataatttgaagggttggattgtagaaatagaaaaaaacaagacagatatcaggtttaccattgatattgatatgaagcttactgaaaaagaatgtaaagaaaatgagattgagtttgtaaaggatacaggaaaatatacgcgaatatgtcttcagatttttaaatataactataatgttccagaaaatgaaatagatgagatgcgaatgaaggctgtggtgccatttcagcttgcatatgcagtatcaattcataaagctcaggggctggaatatgattctgtgaaaatagtgattccagacagtatttcggaaagagtgacgcatggtgttttctatacggcaattacacgagcaaaaaagaaactgaaaatatattggagtgccgaaacgatgacgagcgtaatagaaaaattttcaaaggaagagctgggaaccaggagtcttgatattattaagaaaaaattgaattgactacattgtgctctgatcctataaagaaaagataaaaatatataagagttttattaatgtacgataagggattgtgagtacagtgaagaagaaaatgaagtgctggaatagtctttagatattccggcacttggtttatctgcggattgacacggaaggtacgctactggtcacatgtagcgagaacagtaacacaacacctgcgaataccagagcattaaaaaattcagcttgcaataatagaattctcatgttaatctaataccacgcagtcatcattctgatgaactgcaaaaagatctatgaaccaaatcggtaattattcaaaaagctcagaattccgagcagataatccgatgacaaaaccaaaaagatgaatattgtttgaagattatgtgatggagtgagtttcgcgttattgtttctcaaatatctgattttaagggatagttacttccatagaaaactatcttgtgttaagataaatataactttagaatcctcttcttcaggcaatcattcattgcacagaagagaggagaattctatgaaagaaaacaagaaatgtgtatcaactaagagagcaacatcacaatgcaaaacattgaaagagaagcaggaagactttatcatgcttccaacggtagatttctgctttaaggaattaatgcagaatgataacattcgcaagaatattattgcagcactattaaacgttccatccagtgaggtagagaacacagaacttatgcctacgattctaagaaaagaatcgaaagatgataagtatggaattttagatgtccgtgtgaaattgaagaatggagaacagattgatttcgagatgcaggtagaagcatttgattgctgggcaaatcgttctgtttattatctgagtaagatgtatacaagtgaaataaaagaaggcgagggatacgattgcttgaagaagtgtatccatgtgagtattcttgcatatgatcattttctagatgataaagagtgttatcggagaattgcattttgtgatacgaagacaggaaaagagtatacagaccttatggagatgcatatcttagaattgtcaaaacttccaccggaagagaagaatgagacaagtttgttacagtggatgcgctttcttggaggaaaaaccagaaaggattttgaagaaatggcaaagaagaattcagaattggaagaagcgtatgacgtattggataaattaagtgccgatgaaaagaagaggttagaatacgagacaagacaaagagcaatcagagattacaatataggaatgttaaccgcagaaagacgaggaattgaagctggacgaaagattgggagagaagaaggaagaacagagggaagagcagaaggagaaactttgggagtaagcaggattaatcaattaattcttgaattatcgaagcgtggacgtacagatgatatcgtgaaagcagcagctgatgaggaatatcagaaaaagttgttggaagaatttgatttatagttgaccatattgtggtcagatctcatgaaagatatataaacttatcaaactatatcgaccaaacctatcattaatgatataataacgaaaagtttaatggggtgaaggaatatggatcatacagtagaaatctatgaaacggagaaagaattaagagaaaagcgtctggcagcatatgcagaagcaatacagaaaaaggtacagaggaattcagagcagataataaaagaacttgtagaagagagataccgtcaaaataagacacagcaggagatggcagatataaccggagtgagggcatctaatatagccaggtttgagggggcaaagtgtacaccaacactgatcatgttggagaagtatgcgaatgcattgggaaaacatatagagataagagtgtgtgaagataaatagtagcgagatttcacgctattatcttctataacaatcataaatgatagtatgatataaaataaaaaattgttaagaaaaacagtgttaataaaagagagtataagaaaaaaagtgcaactatatatagttgcactttttagccaaaagatgatataatgttgattaaagaaaggataatatgggacagaaggataaattaattaaaaaactgaaagcaaatccaaagactttcttatttgatgaggccgaagcgttgattaattatctggaattctcaagagtaaacaagggaaaaacaagtggatcaagagttatgtttgtaaatgaagatcatggaaatattttattgcataagccacatccgcagaaagagttaaaagcttatcaagtgaaacagttaatagagtttttagaacaggagaagttgatatgaaaaatatcatggaatataagggatatcttggaagtgtggaattttcagaagaagatgaaatgttttttggaagagtactaggaattcgttctttaatttcctatgaaggtgataatgccaaagatttgattgctgattttcataactctgtagatgaatatttaaaatggtgtgaagacaagggaagaaaaccagaaaaagcatataaagggagtttcaatataaggatttctccaaagttgcataaacaattagttatctgtgcaatgtcgcatgatatgacattaaatggatatatacaggaaattttagagaaggcagttgttttataattcttttttcaagcgatgattaattgtatagaagtgaggagcatcttatgagaaaaaccagaaaggattttgaagagatggcaaagaaaaattctgaattggaagaagtatatgacgtattggataaattaagtgcagatgaaaagaagaggctagaatgcgagacaagacaacgagcaatcagggattataatatcggaatgttaactgcggaaagacgaggaatagaagctggacgcaagattggaagagaagagggagaaactttgggagtaagcagaattaatcaattaattcttgaattatcaaagcatggacgtacagatgatatcgtgaaagtagcacctgatgaggaatatcagaaaaagttgttggaagaatttgatttataacaagaatcaaggatgcatactcgtgtctgcgatggaaaaaatagttgcgctgtgccagggggctatatttgcaacagtcgtccgagaagatttggaaagtctattacagcgaatatgctcacagcttactacagcaagggtcgtgattcagaagcaatgtttgctgatttggaaatcagcaagaacacagattttaagaagcatttaaaccagtatgacgtcattcatcttgatattcaatggtgcatggaaccagcaggaggagcagaacaggtagttttacaatcctaaagctgttgtcagttgatgtaccaaagagcatcagtgtttaattgaaaaatacgagaaggattgattgtcattgcccatttatctgtttggtcaaggacagataaaaaaagatatcgaggcacacggaaaataaaagtgtgcttcgatatctttttgttcagtggcaacagcagaaccagctgtagccagcaaaaggtcagtttttacttcaagctgcgtacagcaggaaatccataggaaggttctgctgcttgtacagctcgtaagattgctttagttatgacacgtgctcctagtgcccctacaacgtcctgatctgcagctacattccctaatgagacggcatagatactgtctccatcagctgaggtgtgtaccgggcggatggcacgtgcgtagccgtcatgcgccatacttgcaattttgcatagctgggatttgtcgaactttgcgttcgtgaacacaacaccgatggtcgtattgccaacaaatttattttcttttacatcaatattttgtaatgcgagcagctcggagtccaggaaagttttcccgtcgcttgcaaggagtccggccactttgcgacctgtttcagggtcatagatatcacctagtgcgttaactgcgacaacagcaccaacttgcagtggaccaacctgaacagcgtagctgccgatgccggatttcatgcattggctcattccaagcagtttgcctacggtagcaccggtgcctgcgccatagtttccgtcctgatagttgccgcattcagcattgatacaggcttgataggccattttagcgtctggacggatgtgtgaatctgctacagttagatcaaacaggtcagcctgacaaacgagtggaacttttgtgacaccgacatcaaagccgatattatgctcttcaagatattgcataacaccgccggcagcatctagtccaaatgcgctgcctccggccagcacaatggcatggatggcttgtgcagctgcgagtgggtgaagcaattcactttcacgggaagccggtccgccgccgcggacatccagcccggctggagcaccgctctttcccagcaggaagacagtacatccggtacctgccacgctgttttctgcttgacctattttaaggttttcaaaggatgtgatggagatttctttcatgagtttttcctttcatcttttgttttattagtatctttattgtacaactttctcttatctcatgcaataaacaggtatcttgagttttataacagacaaacgaaagattatttaaggaaagacgataagctcatgtgaacctatcgtctttccttttatggttataaaaagtttattatgaagatggcataattataacgcagatgattaatttaacatcatacggtcatttgcgaattccccgccactgacttcttcgaattttgcaagaaggtcagatactttgaggtttttcttttcctctccggatacatcatagatgacttttccttcgtgcatcatgatcaggcggttgccgtgtgcgatggcgtctttcatgttatgtgttaccatcatggctgtcagattattttcgctgatgatcttgtcagagagtgcaagtacttttgcggcagtctttggatcaagagcggctgtatgctcatcaaggagcagaagtttcggctttttaagggaagccatcagaagtgtgatcgcctgacgctgtccgccggagaggagaccaaccttactgcttaagcggtcttcaagtccaagatcaagttcttttaacgcttctctatagtgttcacgttctttctttgtaacgccccagccaagacctcttttctgaccacggcgtgcagcgatggccatattttcttcaatagacatcgttgctgcggttcctgtcataggatcctggaacacacgaccgaggaagagcgcacgtttatgttcggaaagttttgtgatgtcagtaccgtcgatgatgatatttcctttatcgattccccatacacctgcaatcgcattcaatgttgttgatttgccggcgccgttacctccgatgatcgttacaaaatctccgggatttaagttgaggttaactccgttgagggcacgtttttcattgattgtaccggcattaaatgttttataaatatctttgatttctaacatgtatcccattattttgcccgtcctttcttgaagtaagtatctttcatataaggaactgcgaggaagcatgcaacaactacagctgagaacagtttcatataatcagatggcatcttcagccagagtactaatgcgattacaaggtagtaaaggattgctccgatgaagactgcaccgagtgtgaaggcaaaagctgcttttctgtgtgcacagaattttccgaagatcacttcgctgatgatgacggctgcaagtccgataacgatcgcgccacgtcccatattgacatcagctgcgccctggtactgtgcgtaaattccaccgcaaagtcctacaagaccgttggagatcataagtgcaagaactttgttgaatcctgtgttgatgccctgagcacgagccatctgttcgttacatcctgtcgcacggatggatgcaccgagttctgttccgaagaaccagtagcagagtgcgatcaggatcagtgctgcaaggattaatttcaggaagaagatccagttgccttctccggttacataacgaagagaagcaaccagtttgtactgcatgacattgaccgcctggttggatttccccataatgccaaggtttacagagtaaagtccgatctgtgtcaggatacttgccagaattccaggaattccgaaaaatgtatgtaaaactcctgtcacaaatcctgctgccatacctgcaagaaatgcaaagacaagtgcaagtgcaggattcacacctgcgcggatgagcataactgcgactgcaccgccggttgcaagtgaaccgtctacggtcagatccgcaaagtcaagtatacgaaatgtaatgtaaacaccgagtgccataattccccagataatgccctgggccacgttgcccgggagagcacgtaccagagtcattggatcaagggctgcgaaatatgctgccatgatttatccctctaatctttctttttattgtttcatataaatagataagtataattaaggttactgttcacaggtaatatcccgcgagatgttttgccatgaatatagcaaaatcccgagacatacggggcaaaatcccatcaccgaaggtgatttggaatgaattttgaccaagttgctgtgaacggagtgaacagtaactagaatcaagagcgaccattcatctggatgaagcccgcccttgagaaaaatgtgttttgtttaatatcttctaattaatatgttccggttgaatggaagaatcttattcttcgattgcttcatatccgtctggaatagtaattccaagttcctcacagatggtaggattgtacatctttgttacattcggggcactttcaatcttcattgtagtaatgtcagcaccgtttacaaggatgtcgtaagccatctcaccggctttgtatccgatatcgtagtagctgatagaaagtgttgcaataccgcatcctttacagattccctgctcaccggcgattacaggaaccttagccggcagacagatgttattgatgatttctgtgtttgaagccattgtgttatctgtaggaatgtaaagtgcatcacattcggaaactgcatttgttacaacagactgaatctcattagaatcagcagctgtgtactctttgtatgcgactccatctttctctaatgcttcagcgaaaagctttgcctgatatgctgagttcggttcagcggagcagtagagaagtccgactgttttagcatcaggaatgagttctttgagcattgcctcctgctcatcaatcggtgcaagatcacttgttccggaaatgttcattcctgttgttcctgtccagtcagagatatcaagtgctgtagcatagtctgtaacagatgttccgagaatcgggatatcacttgttgctgcgcttgcacactggagtgctgttgttgcatttgcaagaatcagatccacattatccgctacgaagttatttgcgattgtagcacagttagcctgctcgccctggccgttctgaaggtcgaatttgacattgccttctccgaacttttctgtacaggcatcttcaaatccttttgttgcttcgtcaagagcagcatgctctaactgctgtaagataccgatcttataagtctttcctgaatcggatccgttgtctgcgctcttatctgtagagtcggatgaacttccgcatgctgcaagtgaaagtgtcattccggcagccataagtactgctaaaattttcttagatttcatgattgtgtcctccctttttcgattcatacaatccacactttaaaccgttacgctttaaagcgctaaactgtaagatgtcatgtgttaaattatagcacgattatttgatacgtcaagtgaaaatggaacaaaaatgcaagattgctgaaaaaatgttgcaaaaaaacaatgctttattcgtctggaaaattgtgatattataagatatggtgtaaaattaagaatcatgaaagtctttcttctataatatggggatttttgctgcaaagaaattaacagaaggatttttatggaattggataaaggagtttatttttatagatgaagaaaaagcacgaacacatcatagaaagtgtgaggccaggaagcattgcggaagagcttggaattgaaccgggagatgttctgctggagattgacggtcaggtgatcgaggatatttttgactatcagttttatgtggaatctgaggagctgcttgttgtgatccgaaaagcgaacggggaagaatgggagcttgaaattgagaaagatgttgatgaggatctgggaattgatttcggtaagggactgatggatgagtatcattcctgccataataaatgtattttctgctttatcgatcagatgccgccggggatgcgtgatacgctgtattttaaggatgatgattccagactgtcattccttcagggaaactatgtcacactgacaaatatgagtgagaaggatatgaatcgtattgtccgttatagactggaaccgatcaatatttcgttccagacaacgaatccggagcttcgttgtaagatgcttcataatcgttttgcaggggaggctttgaagaaagttgatatcctgtatcagggcggcattgagatgaacggacagattgttctttgccgtggagtgaatgacggggaagaattggaacggagtatccgtgacctgacgcagtatctgccgcttttacgcagtgtgtcagttgtgccggttggactttccaagtatcgagatggattgtatccattagagccatttacaaaggaagaggcgaaggaagtcattcgcacgattgagaagtggcagaagaaagtctacgcagaatacgggatccattttattcatgcaggagatgagtggtatctgctggcagaggaagaagttccggaagaggaacgttatgacggatatcttcagctggagaatggagtcggtatgcttcgtcttttatttaatgagtttgaagaaggttatgcgaagctggaaagcggagaacatcaggaagagatttcccttgcaacagcaaagcttgcatatccgtatcttgagcgtatggcgaagaagatggaggagaagtatgagggacttaaggttcacacatattgtatccggaatgatttcttcggagagcgtatcacagtctctggtctgatcacaggacaggatctgatgaagcagttaaaagatcagccgcttggaagcaggcttctgatcccatgcaatatgctgaagatggacgaggacattttccttgatgactttacattgaaagaagtatcagatactttacaagttcctatagatattgtaaaatcaagcggacaggatctgatcgatgctattttaggtgtcgcaggtccgaatcccacagatatagatgagaatcagatgaaagaccgtaggatcactacggcttaagagaaactatttaagaaaaaataagagaaaacaggaaggtaagaatagaatgagtaaaccagtagttgccattgtagggcgcccgaatgtgggtaaatcaacactcttcaatgtcctggcaggagagatgatctccatcgttaaggatacaccgggtgttacaagagacagaatttatgcagatgttgactggcttgacagagacttcacactgatcgacacaggtggtattgagccggatagcagtgatatcattctctcccagatgagagagcaggcacagatcgccattgacacagcagatgttattatctttatcacagatgtaaagcagggacttgtagattcagattccaaggttgcggatatgcttcgccgttccggtaagccggttgtccttgttgtaaataaggttgacaattttgataaatatatggctgatgtctatgaattctacaatctcggaatcggagatccggtgccgatctcagcagcatccagacttggtcttggagatatgcttgatgcggttaccgcacatttcccggagtgggatccatcagaagaggatgatgatcgtccgcgtatcgcaatcgtaggtaaaccaaatgttggtaaatcctctatcgtaaaccgtctgcttggtgagaaccgcgtaattgtatccaatatcgcaggtacaacaagagatgcgattgatacagagatcgtgcatgacggaaaggaatatatttttatcgacacagcaggtcttcgtagaaagaataagattaaggaagagctggaacgttacagtatcatccgtactgtaagtgcagtagagcgtgccgatgttgtccttatggtgattgatgcgacagaaggtgtcacagaacaggatgcgaagattgccggaatcgctcatgaaagaggcaagggagttatcattgtcgttaataaatgggatgccattgagaagaatgataagacaatgaaagaatatgaaggaaaaatccgtcaggtactttcttatatgccatatgcagagattatgtatgtatctgcactgacaggacagagacttccgaaactgtatgatatgatcgatatggtcattgagaaccagacacttcgtattgcgacaggagttctcaacgagatcatgacagaggcagttgctatgcaacagccaccgtcagataaaggtaagagattaaaactctactatattacacaggttgctgttaagccaccgacttttgttatctttgtaaatgacaaggagctgatgcatttctcctatacaagatatcttgagaataagatccgagaggcatttggcttcagaggaacttcactgaagttcttcatccgtgagagaaaggaaaaggatcagtagaatggaacgtattatctgtctggtgatcggatatgcctgcggacttctgcagagtggttatctggttggaaagatgcatcatattgatataagaaaagcaggaagcggaaattccggttcgacgaatgcactgcgtgttatgggactgaaagccggacttatgactttcgcgggagatgtgttgaagtgttttgcagcagttctcatcgtccgtgcaatataccatggaagtaatattcttccgcttctgatgatgtatgcaggagcaggagttactttgggacataacttcccattttatatgaattttaaaggtgggaaaggaatcgctgttatggcggcacttgttgtgagcaactgtttctggcatctgccgtacagttccatcctgttttttgtcacactggcattttttcttgtgccggtgcttgtgacgagatatgtttcccttggttcattgcttgcttatgcagtgttttttatccagatggtgatcttcggacagcttggatggtttgatatggcgaagggtgcggtatatgagttatatgtgatcacgttcttacttacagcacttgcatggtacagacaccgcgccaatattaaacgtctgttgaatggaacagagaataaattcggttcaaagaaataaaagaagcgaagaaaaggagagatgatatggcaaaagtaggagttcttggggcaggaagctggggaacagctttggcaatccttcttcatgataatgggcatgatgtaactgtttggtcgatcgatccgaaagaagtggagatgctgagcgagaagcgggaacatgaatctaagcttccgggtgttcctatttcagaagagattatgatcacaaatgagatggaagaggctattaaagggaaagatttcttagttcttgcagttccatctatctttacaaggagtacagcggcaaagatgaagccgtatgttgttgatgggcagataatcgttgatgtagcgaagggaatcgaggaagatacactgatgacgctgtctcagcagatcagccaggagattccgcaggcggacgtagcagtgctcagtggaccgacacatgcagaagaagtaggaagaaagcttccaacatcctgcgtgatcggtgcaaagacaaaaaagacagcagagtacttgcagtctgcatttaacagtaaagtattccgtgtgtatacaagtcctgacatgcttggaatcgagcttggaggttctcttaagaatgtcatcgcacttgcggcaggaattgcagatggtctcggctatggagataatacaaaggctgctctgattacacgtggtattgttgagatcggaagacttggcgtgaagatgggcggcaagttcgagagcttttgtggacttaccggaatcggtgatctgatcgttacttgtgccagtgttcatagccgtaatcgtaaagccggttacttgatgggacagggcaagtccatggaagaggctatgaaggaagtaaacatggttgttgaaggtgtctattctgcgaaagcagctgcaaagcttgcacagaaatatgaagttccaatgccgatcgtagatgagatcaacaaggttctttttgaaggaaaggatccaaaacaggcagtagatgatctgatgcttcgcgagtctaagattgagaactcttctcttctctgggaagaataagagaacgaaacgaatataaaattaaaagtcatacccctttgtctggctgcatacattggtatcagcagaacaagggggtatttttatggattcatttcaggtatacaaagatatgaaagcacggacaaacggagaaatctacatcggagttgtggggccggttcggacaggcaagtcaacgttcatcaggcgttttgcggagcttttgattttgccgaatcttaaggaagagcatgtaaagcagcggacacaagatgaactccctcaggcagcatcgggaactacgatcatgacaacagagccgaagtttgtcccaaaagaagcagcggatgtaaagctttcagatgacatagaggtgaagatccggctggcagactgtgttgggttcatggtggatggggcgaatggccataccgagaatgggcaggagcggcaggtgaagacgccatggtatgactatgagatagcatttacaaaggcagccgagatcggaacacaaaaggtgatacacgatcatgcgacgattggatttgttgtgactacagatggaagtgtgacagatctgccaagagaaaactatgtggcagcagaagagcggacagtgaaagaacttcgacagatcgggaagccatttcttattttattaaattgccagaaaccgtattcgaaagagacagatcgtctgaaattagctcttgaggagaaatatgcagcacctgtttatccggtgaattgtgaacagctcaaggaagacgatatttatgaaatgatgcgccaggtactgtatgaatttcctgtcacggaaatagaattttatattccgaaatgggtagaaatgttgtcacgtgatcatagaattaagaaagatctgattgagaatgtgaagaaaattatggctcagatgtcggatctgcgaagtgtctccggaaaagactggaagacagaaagtccatacatagaccagatcctgttggatcaggtagagatggacacagggaaggttatattgcggatttctttctgccagaagtattattatgaagtgttgagtgagttgacaggaactcagatccgcagtgagtatgaattgatttctctgatgaaagagctttcttctataaaagaagaattcagtcagatcaaggatgcatttgcggatgtgaagatgaaaggctatggagtagtcagcccgaagaaagaagagattcatctggatgagccggtaatcatcaagcagggaagcaggtatggagtaaagatccgttccgaggcaccatcgatccatatgattcgtgcgaatatagaaacggagatcgcaccgatcgtgggaagtgagaaacaggcagaagaccttgttgcatatattaaaaaagagagcgaaggtccacaaggcgtctggggaacaaatattttcggcaaatcaattgaagatcttgtgatggatggtatgcgtaataagattacgctgatcaacgaagaaagtcaggtaaaactgcaggattctatgcagaagatcgtaaacgacagcaatggtggtctggtctgcattattatatagtgatcgtgagctttttttttacaggaaaatatgataagataaacagtaagtaaaatatgcaaaagaaagcgaggaattcagtgttgctgaatcaccaacagagaaagattcttgaattattgtgtaaaacagaacatgtgactgcgagtgaactggccggtcagcttggaattggcgtgaagacggtaagagtcaggatcaaggaactgaatccggagcttgagaagaaaggaatccagattttatcaaagtccaggtacggatattatttggatccaagacagccggaaggtatcgaaggactgctgaatccgaaggagaatgaagatccggtgattccgtcgaacaatcaggagagagtacattttctccttgcatatcttctgaacagaacggaatatatcaagtcagaggagttgtgtgatttcctttatatttctaaggggacgctgacgaatacactccggcaggttgaggaaacttatcagaagtatggtattacagttcataagaagccgggatatggtatccgtgtggaaggcagtgaatttaatctgcgtcagtgtatggtggatgtctttgtaaagcaggatagtctggaaggaatcggaagacggcatcagacggatgagatcgagacgctggggaaaatggtctatcagtgtctgaagaaatatgaaatcgaactttctgagattgcttacaatgactttgtggaacatatttatgtggcgatgcgaaggattcgtcaggagaaatatgttgaaccgcaggcagcggatatgcttggaagaaaagagaagcagtttgtggaagaattgacagaacaggtgggagcgcattatcaggttcgtttttctcaggatgagaagaattatctgacactgcagcttgtggggaaggtttatatcgacagtgagacagaacaggaaaatttcgtgatgcaaagcgagatcgaccgtcttattactgagatgctggagatgatctacagggaattccatgttgatttcaggaatgattttcatctgcgtatggagctgaaccgacatatggttccgtttgtccttcgtatgaaatatcatatgatcctgcgaaacccgatgctggaagagatccgtaagaattatgtgctttcttatacgatggcgtcccaggcggcaattgcactgggggaatattttcagcagtcgatttcagaagatgagattgccggactcgcagaggttcttgaactggctttggagcagcaggagaatgaacagaagaagttttcgattctgatcgtatgtgcatctgggaagacgagttcagaaattctcagatataagtacagcagagaatttaaagagtatattgaaaagatttatgtatgtaatctttatgaactggagaactttccgtttgaaaaagtggattatgtatttacaacggtacatatctcttcttatgtaccggtaccgattttggagattggttcctttctgcaggacaatgacattgacagggtgagaaagctttttgcaagagagagtaaggattttttgcagaaatattttaagaaggaattattttttacggatgtggaaggaaagacgaaggatgaggttctgaagaacctgtgccggaaggttgagcaggagaagggacttccggagacattcactgcatctgttttgaagagagaggaacttacaccaacagattatggtaatctggtggcacttccacacccggagcgtgccttccaggagcgtgcttttgttgcagtggcagttctgaaagaaccgatattctggttccggcagaaagtgcaggtcgtatttttgacggcgatcggaagggaagaggatgagaatctgcagcagttctatgaggcaacgacagatctgatccttcgtccggcagatgtgcagaatctgattcgtcatccggattatgacaggttgatccagttattgcgcagagcagaagaataaaatgtatttaatcttcttgatgaatgtgattatatgttcagtgattcaaaagtgaccacattgattgtggtcattttttgagtggagctttttaaaaatatatgttaaattaaggtcagtcgagggacaggaaaggaaatgacgatgagacatctaacattgatctgtatggcaggtatttcaacgagcctcttagtgaataagatgaaacggctgattcagaatgagaatcttgagattgcagtcacagcgatgtcggaacgtgcatttcagggttacacaggtcagacagatgttctgctgcttggtccgcagctgggacatcggttcgaaagcctgaaagaacagtatgagtccaaaggcatccgcatagacaggattgatccggagcgtttcggagcaatggatgcgaaggctgtactggagcaggcatttccagacctgtctggacaaataggtgataaataaaataaattaaagataggagaatgtatcatggcaaaatttacttatgtagtacaggacaacgaaggaatccacgcaagaccggcaggaatgcttgcaaaagaagcaaaagctcttgagggagttaaggttacaatcgctggaaacggaaaaacagctgacgctacaagactgatggctatcatggctatgggtatcaaaaaaggtatggaagttgaagtaacagttgaaggtgagaacgaagaagctgcagcagctaagatggaagagttcttcaaagcaaacctgtaagagaaagtcatacatatattcatttaatttctagttaaggaaagatgttttaacagatcgataataaggattagccctccggaagaaagatctgtcaggacatctttttgtttttattgataatgtaggcgtcgcaagcgaccgccgcaggcgcaagaatgtgccgaggcacattctttgttctagttgcacaaaagtttattgttctgtataatgagaaagtacgagtggagatcatagtagaattaagaaaggggcagacagaagatgagagcggttattttatcattagatacaggggcatataaagcaaaagcagatgtggcagcggcagcatcactcaaaagaatgctggagcaggttgggattgaagtccgggcagcaaaagcatttccagaggataaagaaatgttgaaaacagtgctctgtaagctggcagatgcgggaatggctgaactggttctgacaaccggagcagttggattcctggagaagcattgtgcgccggatgctgtgagggagacagcagaccgtctgcttccaggtattccggaagcactcagggcttataatcttcgtcatacaaagaaagtgattctggatcgttcagaggctggaatcagaaagaagacattgatgatcaatctgccggagagtgccaagatggcaaaggaagatctggaatatatacttccagaagtggtacaggtggtagatactttttcattaagataaaaacagaaggatggaataacaggagagattgaaaatgctggtaaaaatatatacagatggtgcagcgcgcggaaacccggacggaccgggcggatatggaacagtgcttgagtatgtcgacacgaagggacagcttcataagaaggaattgtcccagggatatgagaagacaacgaataacagaatggagctgatggctgtaattgcaggtctggaggctttaaaccgttcctgtgaagtagaagtctattcggattcacaatatgttgtgaatgcgtttaaccagcactgggtagacggctggatcaagaagggatggaaacgcgggaagaatgaaccggtgaagaatgtagacctttggaaacgtctgttagaagcaaagcagaaacacagcgtgacatttcactgggtaaaggggcacgatggacatccgcagaatgaaagatgcgatgagcttgcgacaactgcagcagatggaacaaatcttatcgtagatgaagggctgtaaaaattagaaaacaatgattgattaataaaaatcaagaagaaaatcttgaaaacagtggacaacagagggatttcttagtataattgaaaactgtgttgagtaagacagacaatcgcggctgcaagtgccgaaaggccgcaggtgaggaaagtccgggcttcatagggcaggatgccggataacgtccggtggaggtgactcccaggccagtgcaacagaaataaaccgcctgtgcattttgtgcaggtaagggtggaaaggcagtgtaagagactaccgccttgctggtaacaggaagggcacatgtaaaccccatccgaagcaagaccgaatataagcaatgtggctgcccgtcacgcttaaggtgggtcgcttgagcgcagcggtaacgcggcgcctagatagatgattgttcaacgacataacccggcttatcgttttgctcaatcaatggagggagtttctgtatagaaactccttttgtattttagttattaataatgcagaagaagttatttgagatagattcttttgcaagagacagacaacggaggaattaagacatgggaatgaaaattaatgcagaattaccattacctgcaaacctgaaggcggaatacccgcttccgaaagaactggcagagatcaagaagaaacgtgatgcggagattcgggagatttttgaaggaaaatccgataaatttgttgttatcgtgggaccatgttccgcagacaatgaagattctgtgtgcgactatgtgaatcgtcttgcaaaagtgaacgagaaggtatcagaccgtctgatgatcattcctcgtatttatacaaacaaaccacgtacaacaggagaaggatataagggaatgctccatcagccggatccggatcaggctccaaaccttcttgagggtatcattgcaatccgcagaatgcatatccgcgcgatcaaagagacaggactgacatccgcagacgagatgctttatccggagaacagaagctatcttgacgatatcctttcttatgaggcaatcggtgcccgttcggtagagaaccagcagcaccgtctgacagccagtggaatggacattccggttggtatgaagaatccgaccagtggagacttttcagttatgatgaactccgtaattgctgctcagaactctcataacttcatttacagaggaatggatgttacaacagaaggaaatgatcttgcacatgtaattcttcgtggtggtgttgacaaatatggaacctgtattccgaactaccattatgaggatcttgtccgtctggtagatgtttatgcgaagaaagacctgaaaaacccggcagcgatcattgatgcgaaccattccaactccaataagcagttcaaagaacaaattcgtattgtcagcgaaattcttcacagcagaagatacaatgatgatgtgaagaagatggtcaagggagttatgatcgagagttacatcgaagaaggaaatcagaagatctgcgatcatatgacttacggaaaatctattacagatccatgtttgggatgggaagatacagagaagctgatttataaaattgcagaagagtgttaaatttataagagccaggacagatactacatacggtaactgttctggctcttatattagatgtgggagtcaatcccacatctgatatagataaacgatggattatctgcggctatatttctcctcgcagtactggcatctgtatacctgattctcttcatcagtcagtacaaatacatgatcaagtccctgctcgattgatgtgatacatcttgggttcttgcagcggatcacatttttgatcttcttaggaagagtcagaggtttcttggagatgatctctccgttttcaataatatttacagtaatgttgtgatcgatgaatccgagaatatcaagatccatgaaatcgatcgggcattcaatcttcatgatatcttttttgcccattttattactttttgcatttttgatgatggcaacacagcagtctaatttatccaggtgaaggtatttataaatctccatgcttttgccggcttcaatgtggtcaagaacgaatccttcagcgatacgtcctacagttaatgtattttctaacattttgttacccctttcgtactatgaaatatgattatattagtcaacgtgaatatccaaaagtgtaaggatcagagccatacgcacatatactccgtactgaacctgacggaaataagcagcacgtggatcgtcatcaacgtcaacagagatttcatttacacgcggaagcggatgaagaatatacatatcttccggagcgagtttcattttctccttgtcgagaatgtagaagtctttcatacgtacatagtcctcttcgttgaagaaacgttctttctgaacacgtgtcatgtacagaatatcaagttttggcattgcttcttccagacgtacaacttcttcgtaaggaatgttcatcttgtcaagtacatcatgacggatgtattccggaagtcttaattcttctggagagatcagcacaaaacggatgcctgtgtatctcacgagtgctgtgatcagtgagtgaacagtacgaccgaattttaagtcaccacacagaccgattgtcatgttgtcaagtcttccttttacgttaaggattgtgagaaggtctgtcagtgtctgtgtcgggtgctggtgtccaccgtctcctgcgttgatcaccggaattttagaatgctggcaggcaaccatcggagcaccttcttttgggtgtctcattgcacagatatctgcgtagcaggagattgtacggattgtatcagatacactttctccttttgaagcagaactggagcttgcggaagagaatcccataacgcttcctccaaggttcagcattgcggcttcatggcttaaacgtgtacgagtacttggctcatagaataaagtcgcaagtttctttccgtcgcaggcatgtgcgtatttgtcaggatgtgcctcaatatcctgcgcaagtttcaacagttcgtccagttcttccactgagaagtccagtgggctcattaaatgtctcataagtaacctccttgtgtgattgaatcacattatttatattctagtagatcagtaacggcttttctcttaggtgcttgcggatcatcatccggccagccgactgcaatcagagctgccagttccctctctgacggaatctctaaaagttctgtaattttttcttcatcaaagatgcccatgatcacagtaccaagtccctgttcttttgcagcaagacagaaagactggcaggcaacaccaacgtcaaacatctgccatctgtcccccttttttgtgctgtaggatccgtcacgttcaaaaccggatctgcttttgataaaagtaacagcaaccagcataggaatttgacggataatattagaattgtaaacaggggtataatcatcagcgatctttttgagaatagaggggtcttcaattgcaatataacgagtgatctgtgtgtttttccaagacggagaataggaagcaatagaaataatagaatcaataatagaatgatcaatatgatcaggtttatattttcttatgcttctgcgcatcttgatacaatcagaaacgttcatttgtatacctcccaatgttttttcgagacgcttgaatcagataaaaccgattgttctcgtattccatactatgatatactaaaacgagaagattttcaacaggaaaataaacttttttcaaaggatagattttgtggaaaaaatgtattatacttggtactgttcatgcagtgtttttactatattaattgtgttacaaatcagtataaaagagatgcagtatggatggagttttttagtaaggagaagttaggatggcaacacttgaagaactgagagtagagctcgacaagatagataaccagatggtagaactttatcagaagagaatgaatgtctgccgtgaagttggagattataaggtgaaagccggacgtaaagtgtatgaccggcagcgggagcaggagaaacttgcagatgtggcatcaaaggttgacaatgattttgataagaacggagttcgtgaattatatacgcagctgatgtctatgagcagaaaactgcagtatcagaagctcgtagaagcaggagcacttggaaggcttccttttattcagattgattctcttgagaaggatactgccagagttgtgttccagggaacagaaggtgcttacggagaagcagcaatgcatcagttctttggagaagatgtgaattgctttcatgtaagaacattccgtgatgcaatgactgcgattgaagaaggtgctgcggattatgcggttcttccgattgaaaattcatctgcaggtccggtgaacgagatgtatgatcttctggatgaatttgagaattatattgttgctgagacgatccttccggtagtgcatactttgtcaggacttccgggaacaacacttacagatatcaaacgtgtttattcgaaagcagaagcccttatgcagacgactgggtttttgaatgaccatgcagactggcagcagatcagtgtagtcaatacggcaatcgctgcgcagaaagtagtaaaagatggcgataaggcacaggcagctgtatgtagtgcctatgcggcgaagattcatgggttggaagttcttgcagataatataaatgacgagccggataactgtacacgctttatcgtggtgacaaatcagaaggtttatctgaagcatgcgtcaaagatcagtattgaattcgaacttccgcatcagagtggggctcagagtggttctctttatgatcttctgtcacattttgtatacaataatataaatatgacaaagattgaatcaagacctgtgaaaggaaaacagtgggaatatcgtttctttgtagattttgatggaagtctggaggatgcagcagtgaagaatgcattgcgtggactgagagaagaagcaacgaatttgagaattcttggaaattactagatattagaatagatagaaaaacagaatacagagcaggtggagcgaaagctccggagggatttactggaaaagaggttatttagaatgcgtacaaacgaactgatgctgtataaaaacatggaatatggggagattttaaaggatatcacatttctgatcgataattatgaaagtgaattttataacaaagaagatttaagaggacttctttttgattgtatcaatgaacttttggaattatcagtaagccacggctttgaaggaaatctgtggcatacttatctgacatttcttcttgcaagtgatgagaatgcatacagcacttcctgtgagattgtaggagagattgaaggtagtctgaatgagatagcacttcatgattttgctatttttaaggaaatgtttgactatgattttgaggaactggaaaagagtttggacgctgactgcctgaagatcatcatggattataagagtggtaacagtggcggtaaagtgttcaaccgtcgtgtcagggacagaatctgtgatctcagccgtgcccttgccgcgacgcagaatgtggatcatttcaagcgtacactgacacagttttataaggaatttggagttggtaaacttggacttcacaaggcatttcgtgtggaacatccggagaattctgatgtggagatcattccgatcacaaacattgctcatgtacatcttgatgatcttgtaggttatgaagatgcaaagaaaaagctggttgacaacacgaaagcatttgtagaaggaaagaaagcaaataactgtctgatgttcggagatgccggaacaggaaaatcttcctcgatcaaggctattttaaatcagtattataaccagggacttcgcatgattgaggtgtataaacaccagttccaggatctgaatgatgtaatcgctcagattaagaatagaaattataaattcattatttatatggatgatctttcttttgaagaatttgaaattgaatacaaatatttgaaagcagtgatcgaaggtggtctggagaagaaaccgaagaatgtgttgatctatgcgacatcaaaccgccgtcatctgatccgtgagacattccgcgataagcaggacagagatgaagatatgcatacaaatgatacagtacaggagaagctgtcattggttgcaagatttggcgttacgatttatttcggttcaccggataagaaggcattccaggagatcgtacgtgtgcttgcgaaaaagaatggaatcaatatgccggaagagcagctgcttcttgaggcgaatgcatgggaactgtctcatggcggtttgtctggaagaacagcacagcagtttattgattatctggcaggacgggagtaatgcattgtgtggaaggcttttagagtcaaacagagcttgaaaaataaaataacagaagagagaaacaagagtggatattacaagaagctgttatctatacagttactgatagcatccgttatagttatgctgttttgttccggatgtgccgggaagatgaatgcaaagaagatttttcgtcagtcttcggaaaatatgcagaaagtaacttcttcagcaaaccatgtggagctggcaattcagatgtctgatattttagatctgatggaagtaaacatggagatggatctggagaacacgacagagcctccggccggttatgcgaaaggaactgccagggtgacgatcaaagattctgaggtatctgcagatctggaactttatcaggtggaggaagacggaaaacaagtgacatatagtggcacgaatggatcctggaagaaagagagtgcagaaggaagcaacgagaatcaccttggtattgacggaaatattttcgcgcaggaggggaaagcacttgagtctttccacctatccgagcaggagacaacagtaaatggcaaggcatgttatcagttgtatggcgatgtaacaggaacggagcttatgggtcttcttggcaaagagatggtagaagcatatcatctggtgaaactcccggaggaggatgcaatccgtaatttgaaaatccctgttatttttgacatttacaaagaagaactgcttccggcgaagatcgttgtagacatgagtgatgtaatgggagacttatataagtcttacggagagactacgaaagtaaatctttactcgatcgtgcttcagtttacggactataacaaggtggatgaaatccatgttccggatgaaataaagaattctgcgaaataaatgaaacgttgtcagaaatcctatgatggatagtatataaaaagaaggaagcttcaggtcaggcgtatgccgctagagtcttccttcttttatgttattaccacttatttcatattatacaggtttcatattactcaaagttcttctatgttgctgatatcgctgtcaatcaccatggagtaatttgtataatagacgacaaatccaggcttcccgccatttggttttttgacctgttttttctccacgtagtcaatctcaactttatcggaaccacgcatgctggaataataagctgcaagtctggctgcttcttcgaatgtacggtccggaagctcatccccatgtgttttgacaatgacatgggatcccggagcttgttttgcatggaaccaccagtcatttccgactgcaaagtggaacgtcagttcttcattctgaagattattctttccgacatacatatgataaccgtcactggaaatataatggagtggtttgtttttaatcttgacttttttctttgtatattttctgcggatatagccggagtttgtgagctcttctttgatttcagcaagatcatcttctgtcagtgcaatatcaagtgctgtctgaatggattccagataagtgatctcatccaatgtctctttgcaaagaacagaaagtgcttcaaaagtacgtttttgcttgttatattttgcaaaataacgctgggagttctcctgcggtgtttttaatggatccatcggaatggataccatttcattggtgtaatagttcagacattcaagagtctttgcaccttcttccaaattgtatccataagtgttgatcaattcgccgtacactttaaatttttcacgattttctgtgtctttcaactgacgcagctgcaagtcatattttttccggtttcgttctaatgcagtctgaactacgtgacgcagatcaaccgatttctgtcggatgcgggtaatgagactgcgtgtcgaataataagtctcaagtacttcggaaacagaatcatattctacccttgtatagttgacaaaatgactcagtggaagagcagagaattcttttggctcttttccatcgaaataaatactgggtgaaaagctatcttctttgatcgcggataaataaatcttaaactgtgtatatagatgaagtaaaatatcagcagaatactcctgagccgggacagaagaatccattcctgcaagggagcagatctcctccgcggttacaggactgattccggtaaaacttgtataaattgctttggcaagtggcattggtttacttgtcagatgcgctgcgaattcttcagaagttaccgtgagcggatctactttctgcatggtgtccggaatgaaatactctcttcccggaagaacttcccggacagaactcatctgtgcagatacatgtttgatactgtcaatgatcttaccctgatcgttacagaaaatgatattgctgtgctttcccatgatctcgacgatcagatctttccggcagaggtcaccaagttcatcgagatgttcaattgtaaaatgaataatacgctcaagtcccggctgccagatatcaacaatgcggccgccgctgatatgtttacgaagaagcatacagaagtttggggcagtcatcggacttggcttattctttgaggtcagatagaccagcggaagagaagcatccgccgaaatcgacagacgatactgaccttccgttgatttgactgtcagaagaagctcatccgcttccggttgtgcaatctttgaaattcttccgtttaataatttatgttttaattcgctggcgagactcgctacaacgattccatcaaaagccatagttgtttcctcctgaacaaaaggtttatttgttactgttcacacgatgtgcgaccagcaacgcatctcgccattttaaatcgcctttggcgatgggcgagatgcattcaagtcaaaacacgcatcctccgtgtcaatcagcggagtgattgacacgggagtgaacagtaacgtttgttttcatgtttttttattgtaacataaatcgaatctttataaaagacttgttgaccatttacaaacatttgatgtataatagattagattatagtaaacagaggatgaagacaatgatcaaaagtatgacaggctttggcagatgtgagattcagcaggattccaagaagtttaccgttgagttaaagagtgtaaaccaccgttatcttgatgtgaacatcagaatgccgaagaaacttaatttttttgaaacatccatccggacacttctgaagtcttatgcgaaccgcgggaaagttgatatctttattacatatgaagatctgtcacaggcgcagagctctgtgaaatataatccattgattgcggcagaatatatgaagtattttaagcagatggaagaagaattcgggctggaaaatgacatcagcgtatctgcactggcgagatttccggaagttcttacgatggaagagcaagtggaagatgaagaggagctttggaatggactgaagaaagcactggaaggggcttttacacagtttgttgagacgagaataacagagggtgagaacctgaagaaagatattcttgcgaagcttacatttctggagcaggaagtctctgcggtagaagaacgttctccacagattgtggcagaataccgacagaaactggaagagaaagtggctgagttgctggcagatacacagctggaagaaaaccgcctggcagcagaagtgattctgtatgcagataagatctgtacagatgaggaagttgtgcggttgaagagccatattcagcatatgagagcaacattggaggagaaagaaggaatcggccgtaagctggatttcattgcgcaggagatgaatcgcgaagcaaatacgattttatctaaagcgaatgatatcgaggtttccaatcatgcaatcagtctgaagacagagatcgagaagatcagagagcagatacagaatatagaatagagtaaaagagggcaggatcatgaataagaaaggcattttgattgtcgtatccggattctcaggagccggaaaaggtacattgatgaaagaattaatgagaaaatatccggagaattacgctttatccatctctgcgacaacgagaagtccacgtgacggggaagtagatggcagagaatatttcttcctttccagggagaaatttgaaaaaatgattgccaataatgaattgatagagtatgctaaatacgtggaaaactattatggcacaccgcgtgtatatgttgagaagatgttggatgaagggaaagatgtgattcttgagatcgagattcagggagcactgaaagtgaaagaaaagttcccggatacacttctgatgtttgtgacaccgccgagcgccagagaactgaagtcccgtctggtaggaagagggacagagacgatggaggttattgagtccagaatgaaccgtgcctgtgaagaggcagagggaatgagtgcttatgactatcttgtcgtgaatgatgaactggatgattgtgttgaagagatgcattctattatccagggagaacaccacagaagttcacgcaatgtgaattttatgaatgagataaaagaagaattggaagagttgaaaggagaaaattaatatgctgcatccatcttatactgacttgatgaaagtagttaacaaagacgttgaagagggagattctaaggttgtaaacagccgttattctatcgtaatggctacatctaagcgtgcaagacagctgatcgccggagaacttccgcttgtacctgcgaaagacggacagaagccgctttccattgcaatcgaagaactgaatgaaggtgagcttaagatcttacctgaggacactgacgaagagtagaatcggaacagtaacggagcagatgcagaaaatgcaatctgctcttttgacgttgttgttgaacgttttgtgcatgcatggaatgtatgaaatgatgcacagaaggtgagatttatttattttttttagaaaggatgaccaggaggttttactaatatatgaagatactttttatatccttaggatgtgataaaaatctggtggatacagaagtgatgcttggaatgcttgcttcaagaggttacgagatgacgaatgatgaacaggaggctgatattattgtgatcaacacctgttgttttatccatgatgcgaaagaagaaagcatccagaatattcttgagatggcagaatataagaagaatggcagtgcaaaggcattgatcgttacaggatgtatggcagagcgttatcgtcaggagattcttgatgagattccagaggtagatgaagttcttggaacaactgcatatgatcgcattctggatgcggtagatgcggcacttgccggacaacatgaggttatgacagctgaccttgatgctcttccattaccggagacgaagcgtcttgtaacaacaggaggacattttgcatatctgaagattgcagaaggatgtgacaaacattgtacgtactgcatcattccgaaaatccgtggaaactttagaagtgtaccgatggaacgccttctgaaagaagcacaggatctggcagagcagggcgtaaaagaattgattcttgttgctcaggagacaacgctttatggaaaagatctttatggagagaaatctcttccaaagctgctccgtgaactttgcaagatcagtggaatccgttggatccgtattttatattgttatccggaggaaatcacagatgaactgatccaggtaatgaaagaagaatcgaagatctgtcattatcttgatctcccaatccagcatgcgaatgataccatcttgaagagaatgggacgcagaacttcaaaacaggagctgatcgacattgtgcagaagcttcgtaaggaaattccggatatctgtcttagaacaacactgatcacaggctttccgggagagacgcaggagcagcatgaagaggtgatggaattcattgacacacttgagtttgatcgtcttggagcatttacgtattctccggaggaagatacaccggcagccacattcgaagatcagattgatgaagaagtgaaagaggatcgtcaggcagatatcatggaacttcagcaggaaattgcattcgataaagcggaagacatgattggaagagaagttcttgtcatgatcgaaggtaaagtcgcagatgagaatgcttacgttggaagaacttatcgtgatgcaccgaatgtagacggtttgatctttatcaatactgacgtagaattgatttccggagattttgcaaaggttaaagtgaccggggcattggattatgatttgataggagagttgatatagtatgaatttaccaaacaaattaacagtattacgtgtgattatggttccgttttttgttttctttatgttgacagatgtaggcggagctgcgaataaatggatcgcgcttgtactttttattgttgcaagtcttacagatatgctggatggtaagattgcaagaaaatacaatcttgtaacaaattttggaaagtttatggatccgctggcagataaacttcttgtctgctcagcaatgatctgtctgattccttcaggaaaacttccgacagcagttgttattgttattattgcaagagagtttattatcagtggtttccgtctggtagcatctgataatggcgttgttatcgcagcaaattactggggaaaattcaagacagtatctcagatggcaatgatcattgttctgattgctgattttggcggtgtattcgacatggttggaacagtactgatctggattgccacagcacttactgtgatttctctggtagactatgtgtgggcaaacagagaggttcttacaaagggaggcatgtaagagatgtatcttgagtggttttttaaagagaaagctgcaggtgagaaaagtctggaagaagttgtagtagatcttcttgcagagcgtaaacttcatgtgacaacagcagaatcctgtacaggtggattgattgcaggaacgttagtcaatgtggcaggagcatcagatgtgctgaacgagggctatgttacgtattcgaatgaggcaaaggaacgtctaattcacgtttctcatgcgacacttgaaacttacggtgccgtgagtgaacagacagcgcatgagatggctgagggtgcggcaaaggctgcgaatgcgaatgcggcactaagtgcaacaggaattgcagggcctggaggtggaacagaagaaaagccggttggtcttgtatatattggatgttatctgaatgggaagacgacagtgaaagagtgtcgttggaatggaagccggatggagaacagattggatactgtgaacgcagcattggagatgctgaaggaacgtctgatggaagagatgccggtgtaataagaaaagattaagttgaagcagtaactgtttccaaaaggatacagaagctgcttttcttatacataaatttgtcaagtgtcatatttatataattctttccctcagatggtgaaaatcttgtcaaagttgtgattgacgaatgcgacaaattgtgcgaaaataaatacatatggtgcagggagaaagagtttgtggcaggtgacaaatcaacttctcaccgcgcagacagttcagtgttaaaaaataatgcagagctgtcagtttttgtgcgaaaaaaatagtgtaccgtatacgaagaaaatcatacatattgaaaggagtattaacatgatttattcacacgaagtagaaatgatgtgtccggtagcccagggcgtaaaccatggcgcagctccaattccagaagaagctaaatgggtaaaggcaaaagaaatcaaagatatctccggacttacacacggtgtaggctggtgtgctccacagcagggtacttgtaagctcacactgaacgtaaaagacggaatcatccaggaggcacttgttgagacaatcggatgttcaggaatgacacattccgcagctatggcttctgagatccttccgggaagaacacttcttgaagctctgaatacagaccttgtatgtgatgctatcaacacagctatgagagaactgttccttcagattgtttacggaagaactcagagtgcattctcagaggacggacttccgataggagcaggacttgaggaccttggaaaaggacttcgttcacaggttggtacaatgtacggaacactgaaaaaaggacctcgttatcttgagatgacagatggttatgtaacaggaatcgcactgaacgaagatgatgagatcatcggatatcagtttgtaaacttcggtaagatgatggacttcatcaaagctggagacgagccggctgtagcgcttgagaaagctaaaggacagtacggacgtgttgacgatgctgttaagatcattgacccaagaaaagagtaaggaggactatttcaatggcattatttgaatcatatgaaagaagagaaaaacagattcttgcaaaactcgctgagtatggaatcaactccatcgaagaagctgcagaagtaactaaagcagctggtcttgacgtttacaagatggttgaaggaattcagccaatctgtttcgagaacgctaagtgggcttacacagtaggtgctgctatcgcaatcaaaaagggatgtacaaaggcagctgatgcagcagcagcaatcggagaaggacttcagtctttctgtattccgggatctgttgcagaccagagaaaagttggtcttggacatggtaaccttggaaaaatgcttcttgaagaagatacagagtgcttcgcattcctggctggacacgagtcattcgcagcagctgagggtgctatcggtatcgctgagaaagcaaacaaagttcgtaaaaaacctctgcgtgttatcctgaacggtcttggaaaggacgctgctcagattatcgcacgtatcaacggatttacatacgttgagacagagcttgactatcacacaggagaactgaaagaagtattccgtaaatcatactctgaaggacttcgtgcgaaagttaactgctacggagctaacgacgtagtagaaggtgttaagattatgtggaaagagaatgtagacgtatctatcacaggtaactctacaaaccctacaagattccagcacccagtagcaggaacttataagaaagagcgtatcgaagctggaaagaaatacttctcagttgcttcaggtggtggtacaggacgtacacttcacccagacaacatggcagctggaccggcttcttacggaatgacagatacaatgggacgtatgcactctgatgcacagttcgctggatcttcatctgtaccggctcacgttgagatgatgggacttatcggagcaggaaacaacccgatggttggtatgactgttgctgtagcagttgctgttgaggaagctgcaaaggctggtaaattctaagaatctattctcagataatgttttaatttatgataaaatcaagaagtaaaaacaaaatagttttttcttcttgatttttttagttgatttatcataagaactatgtttatttgatagattttgttatacttaaaagtaatgaaaactgttgaataatatagcgtttataagaaatgaggtgtatgtatggcattagcacagaaccgtattttcacaatggaagatatttacaatcttccagaaggagaaagagctgaattaattgatggtcagatttatatgatggcacccccatctcggcgtcaccaagaaataatgggttctctttatcgaaaaattgcagattatattgatatgaaaagaggggcatgcaaagtatatcttgcgccatttgcagtatttttaaataacaataatgttaattatgtagaaccggatatttctataatatgtgataaaaataaacttgacgataaaggatgtaatggagctccggattggattattgaaatcgtgtctcctagcagtaaaagaatggattattatattaaattgtttaaatatcgaactgctggagtaagagaatactggattgttgatccaatcagagagatgattttggtatatgattttgagaatgatgattacgaacagtattcattttcagaaatcgttaaagttcgaatatacgacgatttcgaaattaattttactacaatctagaaaatatgaggcattacacatgaagataaagatggtagacattgcaagacatctcggagtttccaaagcaacagtatcgcttgctgtgaatggaaaacccggtgtgaatgaagaaaccagaaggatggttttggaatgtctggaagaaatgaaaaagaacaacggagtaattccagtaaaagagaatatcgttacagtgtctagccatccggtgaatcagatgatcaaaatagtgattgttaatcacagcaaaggcgttgcgtgtaattcagaaacagatctctggtcagatgtacttgctacatttgattctgaagcaagaagacttggatatctttatggagtgacgtatttaaatgacgatattacgcaaacagaagcagtaattacggaatgtaatatggattttgtggcaggcattattctttttggaaccgaattaaaagaagaagatcaaaacctgcttgaaagaatcaaaaagccattggttctttatgactgtgaacttccagatagtcggtatagcagtgtatgtgcagacaatagacaaatgctaaaaagtgctgtggattatctgtacaaggaaggtgcatcagatatttattatttctgcacagggaaagataattataattatcgagttcgtaaggaagcgtttttaaatacaaagtctaacgaagatactgcatcagcaaaatatattcttgatcttggagatgaaattccaaggataatagagactttgttagactggttgagaaaaaatccgcttccgcaaggaattttatttgaaaatcaacagatttcaattggtgcgttgacggcgcttcggaagtatggtgtgaacatcccacaggaagtgaaagttgtcggatttggtatgattcctgactatatataccaggatctaaagttgatacaaatgagaatatctgacacagaaggtgttcttcttgcaatggatttactggataaaaagattcgtcagtactcaaggtctaaagttaagatatacacagaagcagaaatgattgtaagttaaaataatcgtaagacaaaagaacgaaaaaaacaaattggaggaacagaaaatgaatgaatattttccacatttatttgaaccaattaagattggaaagacaacggtaaagaacagaatctttatgccgccgatttccacaaacatggcagataaaggatatgtgacagatgcgttggttgagcattattcagccagagcgaaggggggagtcggactgatcgttacagaagttacgacagtagagccggtatatacatacttgccaggagatatgtcaatctatgatgattcttatattccgggatggaagaaactggtagatgcagtgcatcagtatgatacgaagatcttagcacagctatttcatccggcttatatggcatttccaattccgggaacgcctcagctgatcgcaccgtccaatgtcggtccttattatgcaaaatcagcaccgagagcagtaacagtagaagaattgcatgtacttgttcagcagttcggggaggcagcacgccgtttccagattgcaggtggagacggagttgagatccagtgtgcacatgcacatggactgcttggcggattccttacacctctttataacaagagaacagatgaatacggcggagacattaacggacgtctcagactgacacttgaagtaattgcgaagatccgcgaactttgcggcgatgatttcatcattgatgttcgtatttcaggagatgagtacagtgaaggtggtctgacactgaacgacatgatctatgtatccaaacagcttgagaaaacaggcgttgattttatccatgtttccggaggaaatacaattaagagaggtagttctatgcctgcacctggtacatcaccggcaccgcatgcacatgcaagtgaggaaatcagaaagcatgtgaatattccggtatctacagttgcaagaatcaatgaaccatgggtagcggaagaactcattgctaacggaaagactgacatctgtatgattggtcgtccgaacttgtgtgacagtgaatttgttaataaagctgcagaaggaaaaacagatgatatccgtccatgtattggatgtggacgctgcctgacaggaattatgtttggtaatccgatcagctgtacagtgaatccatctgtagagtctgacgagatcaaagaagcagatgagaagaagaaagttcttgtgatcggtgcgggtccggcgggaatggaagcagcttatgttgcgaagaaacgcggacatgaagttattctctgcgaaaaaagcggagagtttggaggccttttaagactggcagcagttccaatcgctaaacaggaactttgtaaagtaattaagtttatggcacgtcgtctgaagaacgaaggaatcgaagtccgcatgaactgtgaagtaactccggagatgcttgcaggagaattcaaggattatgaagttgtctgttctacaggggcagttccgaaggaaattcctccattcaaagtgttcaagcagacaatgacagccgatgacgtccttgccggaagaaaatacccgggaagaaagatcgttattctcgggggcggatctgtcggatgtgaaactgcagattatcttgcaccattgattgatgacatgttcccagcaaaccgtgacatcacagtgatcgagatgacaccgtcactgatgccgggagaaggcggtgcagctaagagtcagctgacaatgagactcaagagaaaaggtgtaaagattgaactgaacagtcaagtgacgaaggttgatgagactacgatcacttatgagaaagacggacaggagtatcatatcacagatgcggatacactgatctttgcagttggttatgcaccgaacaaagtagaaaatacagaagagagagttcattttatcggagactgtgataaagtcggaactctgaaagatgcaattgctgcaggacataaactagcagaagaactgtaattgaagaaaagttcagaataacaaatatagaaaagaaatatagaaatgaataaaacggagaaaaaagatggggaataaattatcagaaccaattaaggtcggaaatcttacttttaaaaacagaatcatgtttccaccgcttacaacaggttatgaagaaagagacggatctattggggcgagaagtctgaacttctatgaaagacttgcaaaaggtggagcagcgtatgttgttatcggagatgtagctcctgtaagaacagcttcaccgacaccaaagctttatgatgacagccagattcctgtatataaaaacctggcagacacattacataagtatgactgtaagcttgcacttcagctgtttcatccggagtatgatgttccgggtgtcggacgcatgatcatggaagcaggtattgcaagacaggctgcggcaaaagcacaggctgagggaaatgcagaagaaggaaagagacagatggaagaatgcgacaaacttaccaaaggtgcttatgcaaaacttcatcatgatatgcagcattttgttacagaggcaaccgttgagcagttagaagatattaaaaacagcatcgcggcatgtgcagcaaaggcacagaaagccggaattgatgcgattgaagtacatggagaccgtcttcttggttctctttgctctaagattctgaaccacagagaagatcagtacggaggaagtcttgagaaccgtacaagatatgcacttgaagtagtagcagcaatcaaagaagcagcaccggatcttatgattgagtataaactgccaattattacagtaaatcctgatggaacacttcgtggaaaaggcggacttgaggcagaagaaggaattcagtttgctaagatgcttgatgaagccggaattgatatgattcaggttgtgccaggcgaatcacacaggaaacatgggagatacaatcccgccaatgggagatgttccgtataactggacacttccggtagccagagaagtgaaaaaactggtatccattccggttgcaacagttggtcgtgttgtcagcttagaagcaggagagaagattctcgaagacggagatgccgatattgtagcttatggacgttccatgcttgcagatgcagatattgccaataaagctatatccggagagtgcatcagagaatgcttgaactgtaataaaggatgcgtagatgcaattcagggacgtaaatacatttcctgcgtattaaatgcagagaacggaaacgaaggaactatatttatcaaacatgcagacgagaagaaaaaggttgcagttgtaggtgcaggaatcgccggacttgaggcagcaagagttgcagcaaaacgcgggcatgaagtaacggtatttgaaaaatcagataagattggcggacagatccatctggcagcagttccaccgagaaagagcgagattttaagatctattgaatattacgagaagattcttccggaactttctgtagaattgaaattaaatacagaagcagatagcgaagaactcaataagtatgatcatgtaattcttgcaatcggtgcacataacatggatcttccaatggcggttaccgagagtaatgttgtttctgcatgggacgttcttgcaggatgtgaagtgagtggagcatgtgcagtgcttggcggaggattagttggaactgaaacagcagaatttcttgcacagaaaggtctcaaagtaagcattattgagatgttggatcagattgcaacaggagaatccgagacagtaatgccactgatcaaaaaagactttgaagaacacgatgtaaaagagtatgtgaatacaagagtgaattctatcgagaataatgtgattcatgctgtgaatacaaaagacgagtcagaggttacaattgaagcagatacaattgtgaatgcactcgggtctaagaagaatctcttcgacgacagtaagctgacagttccatttgtatatgttggagactgcagcggtgagagaacagcagatatctcagcagcaatccgcagcggatatcaggctggaaatgagagttaagaatcctatgataaacaaagaactattttataaagtaacattaattgattgtaacggaaaagaattggaagttgctaaatttctgcagattttaacaggaatggaaaaaacagaaacaagaagaattgtagcaagtttgccgtgtgttttgtatgaagagcttgacggagaggcgtgttcttatattgaggaggcactggatttctatacagcaaaatataagtttgaaccagtcggtgatgaaaaagaagtgtatgaagtagatccatcggtgtatccttccaaacaggtgatcgcgcttggaagtatggttgattacatcggaaagaggtcagagtttgtaagcatcgcgagaaaatatgacttcccgaagaatgtgagcctgaatgatacgccattcttagtaaaagatggtttggcagaagaacaggcagtgaacctgcggcaggatcttcgcaatatgggaatgtttgcattgatcatgagaagcggggcagaagttcagcaggtgaagaagaggggatttttagcaggggtgtttgcacgttgagatgaataaaagggttgtttgatacagacagctgtgagtagtgattatatagccgatttcttacagaaaattcaattggattttattgacacttttgctgagaaggactacaatatcttcagattgttaatttaataacatacaaataaggagtttaggaggcagacaaaaatggcaaatattttatgtagtccaagcaaatatgttcaaggtgcaggtgagatgaaaaagctgggtgaatatgctcagaagtatggtaaaaaagcacttgtactgatcacagagtcggggtataaacgtattgaagacgttctcaaagttggatttgaaggatatgatattgaaccagtgtacgagtatttcaacagagaatgtagcaagacagaaattaatcgtttggtagccgttatgaatgaaaagggctgtgatgttgttattggtattggcggaggaaagatccttgatactgcgaaagcagttgcttattacaaagaagtaccggtactgatctgtccgacaattgcatctacagatgcgccatgcagtgcactttctgttatttatactgatgaaggcgtattcgaagaatacttattcctcccagctaatccaaacatggttctgatggacacagaaattattgcaaaatcaccagtcagactgacagtttccggaatgggtgatgcacttgcaacttattttgaagcaagagcctgtcaggctagcgaagcaacaacttgtgctggtggaaatgttactatggcagcgatgtcactcgcaaaactgtgctttgatacattgatgaatgaaggtgtgaaggcaaaacttgctctggaagcaggagcctgcacaaaagctgttgagaaggtaattgaagctaatacattgcttagtggaatcggatttgagagtggcggtcttgcaggagcacatgcaatccataatggattcacagttttggacgagtgtcatcatatgtatcatggagagaaagttgcatttggaacaatcacacagcttgttctggaagacattccggcagaagaactggaagacattatcgattggtgcattgaactgggacttcctgttacattaaaagaacttggtatcacagaagtgacagacgagaagcttatggcagttgcgacagcagcctgtgcagagaatgatacacttcataacatgccatttgaggtgacacctgagactgtatgcgcagcaattaaggcagcagatgcttacggaagatatttcctgggagaatagaatatgggaaataggacaccatttcgtaaaaatagaaaaaccaatttgacaaactgattttctgtggtataattttcatgctgtgaaaaacagccgacagttcatttgtaccttcctgtcgaaaaacaaaaccagggctagttaagaagattctaggctctgcgtgcaaagaagtacgcagagctttttatattcaggaaatactttccatatatataaaacgctccgcttaggatacacagctcttaaaaggtacatacatttcaaatacaggagagttgaaatatgtattatttgcaaacaaaagccagttttgatgcagcacattttctctggaaatacgagggaaaatgcagaaatatccacggacatcgttggaatgttgttgcaaaaatcaaaagtcaggagctggagcaagaaggacagacacggggaatggtagtggactttggtaatctgaaaaaggatctgaaaaagctttgtgattcctttgaccatagtctgatttacgaagtgggatctctgaaagcagaaacagtagctgcgcttcagaatgaggactttcatttggagaaagtttcctttcgtccaacggcagaaaatttcgcatattatttctacaaggaattaacggaattgggatatgaggttcattgtgtggaagtatatgagacaccgaataattgcgcggtttatgaggaagagtagatgaaagtagtagaaaaattcaccagtattaatggggaaggcacacgtgcaggagaactggcagtcttcatccgtttcaaaggatgtaatctgcgatgcagttattgtgatactatgtgggccaatgaacctgattgccaatataaagaggaaactccggaagagattttaaattatgttttagaaaccggtattcgcaacgtgacacttacaggtggagaaccgttgctgcaaaaagacatcagagaattgatccaccttcttttacaagccggtttacaggtcgaaattgagacaaatggcgcagttgatttatctgcattttgtgaagaacgaccggtatttacaatggattataagttaccgtcaagcgggtgcgaagaatatatgataacagagaacatggaactgctgggaaaggatgacactgtaaagtttgtatgtggcagccaggaggatctgttaaaagcattggacgtgattcagacttataatctgacaaacaggtgtcatgtgtatcttagtcctgtttttggatccatagaaccagtgcagattgtagaatttatgctaaagcatcagttgaatggtgtgtgtctgcagattcagatgcataaagtaatctgggatcccaatgaacggggcgtataaataagtagtgaggtgatggagatgaaagcattagttctctttagtggaggaatcgattcaacaacggcattaggactggcaatcaaaaagtacgggaaagaccaggtgattgcactctcgatttcctatggacagaagcacgataaagaaatcagggctgcaatagcagttgccgaatattatggcgtggagcatctgttcctggatttaagtaagatatttcaatatagcaactgttcactgcttcaacagtccacggaagaaattccggaggagagttacgcagagcagatttcaaaaacaaatggcgataagcctgtaagtacatatgtaccgtttcggaacggattatttctttcttcggcagcaagtatcgcactgagcaaggaatgtggagtgatttattatggagctcatgcagatgattctgccggttttgcttatccggattgctcaccggtattcaatcaggcgatgaatgaagcaatctgggaaggctccggacatcagctgaaaatagaagctccttttgtaaatgtatccaaagccgaagtagtacggattggattagaactgggagttccgtatgagttgacatggtcctgttacgaaggtggagagaagccttgcggaaaatgcggaacatgcattgatcgcgcagcagcatttcaggcgaatcacgtagaagaccctgcgttgagatagaggagaaagcaatgagagaaaaagaaaatttaacattattgggaaatcagcaaacagaataccgtatggattatgatccgtctgtattggaggcatttcagaataaacatcctgaaaacgattacttcgtcaagttcaactgcccggaattcacaagtctgtgcccaatcaccggacagccagattttgcaacgatcacgatttcctatgttccggacgaacgtcttgtggagagtaaatccttgaaattgtatttgttctcattccgaaaccatggagattttcatgaagatgtgatcaatataattatgaaagatcttgtcaagcttcttgaaccaaaatatatagaagtctggggaaaattccttccacgtggaggtttgtccatcgatccgtattgtaattatggaaagccaggtaccaactgggagcaggttgcctggaatcgtatgagtaatcatgatatgtttccggagaaaattgataatcggtaggataacggaatagaggaaacgagctttgctgatatcagcatgtcgggtttacaaagaacactcatcaacgtgattaattcatctttggtaatcttacggtacttctctaagcatttttatgttattatgaaaacagaattatcacaagagaaaatcgtgagggagaagatatatgggcacactatatacaagactatcatcaataaccggtgagatgtcacctgaatcaatagaacatcatattgctcgagttatgctggaacatattcatcaattgaataacatttccataggtactatggctgatttatgttctgtttcaaaatctacaatctctaagtttgttaagcaattaggctttgaggattacaaagaatttaaagcagaagcatatagtagagggaaaagagaagtttacataaaagatttaaatacgataaatattacagattatatattgcaaaaaggaacggaagaatatctggatgtgctgtttgcagatattcgctacttatttttcaaaactgattcaaaaaagatagaacaattggtcacgctgattcatgactatgaagaagtagctgcatttggagaaggatattcagagactgctgcactgaattttcaacataaaatgtctttttaccagaagttcatttacacaactacaaatgacagaaagcaagtggcgtatattagccgtgcaaaagaaaatacgctactgcttattttttcaaattccggaagatatattagtgagtatacgcatctgacagatgctccatcaaagaagtgttttgaagaaacaaaagcaaaagtagttctgtttacttcaaacagagaaatggagaaagaccctcgagttgatctatgtattgattgggaatataaggatttagtccaaaacaatcctgttttatatcagttgttaattgaacgaattgcaattgcgtatcaaaataaatacggatttccaatggaaaaataaaatcatccataattatttaaaagactgaaaagttcgtaaaatagaaacttttcagtctttctttttttattgttataataacaacagattcaagaaagcgtagtgaaaagatgaggaagaagaaatgaataaaatatgttttcgtgaagaagctaaagattggaatgaagcattgccgataggaaatggattcctcggagcaatggtatttggaaaaaccggaactgaacgacttcaaattaacgaagattctgtttggaccggaagttttatggaacgtgtaaatcctgatgcgcgagagaactatacaaaagttcgagaactcttattaaatggagaaatcgaacaggcagaacttctcgcagagcgaagtatgtatgcaacatatccgcatatgcgacattatcagacactcggagatgtttggatagatttttataagcagagaggcaaaacagtcttcaaaaaggatcaaggggggcttttaagcgttcagcatgaaagtgtagaagttcaaacgtataacagagaattagatatctcgagagctgttggaaaaatccaatatgaatctgaaaaaggaaaatatgaaagagagttttttgccagcaatccggatcatataattgtatatcaaatgaaatccgtagatggcgaacttctcaactttgatttgtttttaacaagaaaagataaccgatcaggacgtggttcatctttctgtgatggtacagaagtcctggatggcaataaaatccgtttatatggaaaacaaggtggagatcacgggattgcatttgaattgcttgtacaggtaagaactaaaaatggcaaaatttcacgaatgggaagtcatttattagtagaggatgccaaagaagcaacactatttatcacagcaagaacatctttccgaagtgaacatccgcttcagtggtgtatggatgtattgagtaatgctgaaaaagaatcttatggaacattacaagaacgtcatagaaaggattatttatcttactatgaaaaaagtaatctgaaattgaattataaagactcttatgagcatctgacgacaccggaaagacttgagcaaatgcgtaatggcatagaagatattgaattaataaatacatattataatttcgcaagatatcttctaattagctctagccgtgaaggaagtcttccgtcaaatctacaagggatctggaatgaagaatttgagcctatgtgggggtccaagtatacaattaatatcaatatagagatgaattactggattgctgaaaaaacagggttatctaaactccacatgcctttgttagagcatttgcaaagaatgtatccgcacggcaaagacgttgctgagaagatgtatggaattgatggattctgttgtcaccataacacagatatttggggagactgtgcacctcaggacaatcatgtgtcatctaccctgtggccaatgggcggtgcctggttctgtttgcatctgattgaacattacaaatatacaaaagacagggagttcttgaaggaatattatggaatactgaaagatgctgttaagtttttccttcaatacatggtaaaagatgctcatggaaaatggatttcaggaccatccagttctcctgaaaatatctatctgaatcaaaaaggagaggcgggatgtctctgtatgggagcttctatggacacagaaatcatcagagaactttttaatggttatctggagatcacagaagaaaatcaacttccgaaagatctgaatgaaacaataaatgagcgactgaatcatatgccagaattgcaaatcggtaaatatggacagattcaggaatggagtgaagattatgatgaagtcgagcctggtcatagacatatttcacaactgtttgcattatatcctgcaggacagatacgtatggataagacgccagaacttgctcaagctgcaaaacagacgattgagcgcagactgaaatacggtggaggtcataccggatggagcaaagcatggatcatcctgttttatgcaagactgtgggagaaagaagaagcctggaaaaacttaaaggaattgcttgaacatgctactctaaataatctgttcgacaatcacccaccattccaaattgacggaaactttggaggagcctgtggattattagaaatgctcatacaggattactcagacaaagtatttcttttgccggcattaccgaacagtctttcagatggagaggttaatggagtctgtctgaaagcaggcgcagtactggatatgaagtggaaggaaggaaatattgataaaatcaaaatcactgcaatgcgtgattgcaagttcatccttgttactgaaaaagaatatccattacatttgaaaaaagaccaaacggtttttttagataaaaattttaaggagagaggaaggaaaacaaaatgaagtatgagaaaatgattcaaagtattctcaaagaagttggcggtcaggaaaatattgagaatgtatatcactgtgcaacaagattgcgttttcagctgaaagatgagacaaaggcgaatgacgaagcagtaaaagcgattgacggagttctttctatcgtaaaaggcggaggtcagtatcagatcgtaatcgggcagcacgtagcagatgtttataacgaactgcagacaatgatgggtacaacagaaaatgaaatcgaactgaaagatgcaaaagaattcaaacaggaaatgaaaaagaaaaagatttccaatcagtttattgatgtgatcagtggggtgtttacaccggtacttggaatgcttacagcaacaggtgtaatcaagggactgcttgcatttcttgctgcaacaggattgcttgcaactacatccggaacatatcagatgttaaacattgttggagattgtttctttaacttcctgccaatattcctcggatatacttcaatgaagaaattcggcggaacaccgtttatcggaatggcaatcggagcagctttagtatatccgtctctaacaacaatcatggcgggagatgcactttatactttattcagcggtactatcttccagacagatgtatatgtagaattccttggtattccggttcttttaatgaactatgcaagttctgtaattccagtaattttaacttgctattttgcagcaaaaattgagaaattctttgcaaaaagaattagtgatctgttcaaaacattcgctgttcctgcgctgacacttttaattagtattattcttgcattcctgattatcggaccaatcgcaacatttgcaagtgatttactcggtgcagcatttacagcactgttcaatctgaatgcaactatttcaggtttcttatacggagcacttattcaggtatgtgttatgtttggagttcattggggatttgttgcaatctctgtaaacaatcttgcaacattaggttacgatcctattacaattgctggtcttgcatctgcattcggacaagctggagttgttcttatgatcatgcttagaacaaagaacaaaaaactgaaaagtgtttgtggaccggctattatttctgcaatggttggtattacagaaccatccatttacggtgtaacattacagtttataaaaccatttatgttagcttgtcttgcatctggtattggtggtgctatcatcggatttggtggagtaaaacagtatgtatatggaacaaacggaatctttggatggcttcaggtaattaatcctcagacaggttttgattcttctgttcttgctgcaattatcgcatgtgctgtaagctttatagctgcaatcattctgatgatgacagtaggaaaagattctattccagaaagcaaataaggatattcttttaagaaaattttaagctctgcgtgtgagaagtacgcagagctttttctaatttcctgtgttcccggagaaagttgataatcgataatagtaaaaaatattaatgtttctgtcctattcttttgatgcagatcagtattatagatggtataataaagcagacattaactaatagattacttgtaggagagataaaaaatgctgaattgtattatagtcggaatgggaggattcctgggagctgtagcccgttatttgattggcttaattccaatcaacccgcaaaatggttttccaataaaaaccttgttgatcaatattatcggagcatttgtgataggactcgtagtagcctttggcgcaaagaaagattggaatccacaattgatcttgttcttgaaagttggaatttgtggtggcttcacaacattttcctctttcgcgttagaaaccaatcagttgatggaacgaggatcgggctggtgggcagcactttatgttgcattgagcgtgaccggagcaatggctgcagtatacgcatcacagtatatagtggcaagataagatttcattttgacgcgaggagagtaaccatgagaaatcgagcatattatcatctgccgggactatttgagttttacgaattgtatcgagtatttttgtcattgtatcgggaacacagagagtatttttatgattggtgtgagatcggttccatatacggtgccccgtcagactgtatctggggtggcggtcgcacgtcctttggagatactgagacagagaaagtattggatttgatgcaggaatataagatatctgcccgactaacattcagtaattcacttttgagagaagaacatttgcaggatcggaaatgtaacacactttgctcattgctggaagaaagaaatgaacctcaaaatggtgtgatcattcattccgatttactgctgaactatttgcaaaagaattatccggggctttatctagtctcgtcgactacaaaggtactgacggattttagcgactttttgcgggaaacaaacagagaagaatttcattatatagtcccggattttcatcttaataaaaaattcgagcaactaaacaagatgaattcaaagcaaaaagcaaaagtagaattcctgtgcaatgaatgctgttggtttggttgtaaagatagaagagcttgttatgaaacagtcagccagaaaaatctgggagaaaattgccaaaatcatgtctgtgcagcaccgggcgcaggagaaggctatcttttctccaaagcaatggagaaccctgggtttattagtgtgactgatatccaagatatttatatgccaatgggattttctaattttaagattgaaggacgaggacttggaagtgcattgattttggaatttctgctgtattatatgactaaaccggaatatcagatccatgtcagagaaaagatatatctagataatatgttggatcttttttgagtacaaaagaggaatagaaggaaagccttgaaaatcaagggcttggggtctgccttttctgttttataaaaatatatggaaaaaatatgatgagaggtgggggatagtggattgacaacatagcatatatcgggtactattaagtaacgcaatgcgttatttaagcaggagagttaaatcatgagcagagggaaagaagtaaaagaattaagagaaaaaatgggaatgaacagacgtgagttcagcgattactatggtattccgtatcgtacagttcaggattgggaagcggagaaaagagaacttccggattatctgttacgtttattaaagtatagagcagagatagaatgtcgaatcgaaagagtagataattaaaggtatcctctgtatattttttgcaataagcataacgcaatgcattataatacgtaaatgtttaggaggttaacttggcgagaaaagtaaatgttatcgaagatttgaacggaaagaaaacagtatttattcacgatattctgttcaatggaaaaagagcagttaattgggaagaagttgaaaagtatttacgccagtatgtaggagaattctatcagatagaagattgcaataagatgatttatattggatcggatcttcctgatgagtatacgcactcaaattatactcggattttgaaaggagcaaatgcgaaagcaaaagcgaatgccacacagggattaccggaattgcttaaaatagcaacgaacgaggtttatgaagataatcgtaaggagaagcatagtaaagatgctaaatatggttggtattcatatgattcaagatttgctcttccggtatttggtgatgatggagaaatagagagatacaacgtctttaatgttgcgatgttggtcagacacgatgaagatgggaaatattacttatacgatatcatgaaaataaaaaagaaacgagcaatcttttccagtcaaatgaccttactcagtaacaaaacccatttcttgattatatgatacattgaacagtattaaatgtcaacgaaaaaagcataagaaatctcaatgaaaagccagcccagctattcatcggaaataccattgaaaagacaggcttagatacactgattaacatcagtgcgtccggacatgtttttggtgttatcgtttctttcgcctacatttaccacgtctacttccaacagatttcaatgacaaaccttcgcccatgaggtataaatactaacgtttactatttatcaatcacttaacaaattcaggtacaggaaagacttatggatgttaaaataattagatcgaacagaaagactgtagctattcaggtgaattctgatttgagtatcactgtaagagctccgcattttgcttcagagaaagatattgaagagattcttatgaagaaggaagcctggataagcaaacatatcgaagagattaagacacgaaagaaaagattcgaatcggaaagtacagataaatttactcctgagaaaataaagttgcttgcagacaaggctcttgaggtcattccaatgagagttgaatattttgcaaatataatgggggttacatacggaaatataactatcagaaatcagaagaccagatggggaagctgcagcagtaaaggaaacttgaatttcaactgtctgttaatgttagctccgtcggaaatattggattatgttgttgttcatgaattgtgccatagaaagcaaatgaatcactcgaaagcattttggttagaagtagagaaagtgcttcctgattacaaagaatctattgagtggttaaaagaagagggatgtcagctcatgtatttggtgacaggaaggtaaagtgatttacgaaaattaatttacggaggcattaaggaatgaatcaaaatgaaacacaatgggataagcttctaaagataaaaacaacgggtcgagatgattctcgcgccgatcagtatagatatccatatgagccaacgccttatatggtattggaacgtttagcaaacagcggactaattaggaaaaataatactctgatcgactatggaaccggaaaaggacgagtatgtttttatctgtcctaccaaacaagatgcaaagcggtaggcgtagaatatgatgaacgaatctataaaggtgcggcagacaataaagaattagcagtatctggtgcccgcacagagtttgtgctatgttgtgcagagaattatgaagttccaacggatgtagattgctgttatttttttaatcccttttcagtagaaattttgcagtctgttttagcaaaaatctatgaatcttattatgaaaatccgagagagatattattatttttctattatccgtcagaagaatatgtaagtgccttgatgacacaggaacagttgattttttatgatgagatcaacacttcggatttattttcaagtgaggatgttagagaaaaaattttaatttttcaggttctttaagaagaattttgttagtattaacaataccaaatactgaaaatcaatcaagacgccgttcgtttactgaaagaaatctatcaaatagacatggaaaaaagggtgcacatttgaagaactacatggaaacatttgttcgaaataacacttgcattatcgaacaaatgtttgtataatgaaaatatgaatacagatattagaaatagtaattatacaacacaggaaaagctgcagattcttgctgacgcagcaaaatatgatgtggcatgtacttcaagtggatccagccggcggggaaagaaaggagagctcggcaatgcagaggcatgcggcatttgtcatagctttgcagcagacggaagatgtatttctcttcttaagattttaatgacaaatcattgcacgtacgattgtaaatattgcattaatcgcaaaagtaatgatgtgaagcgggcaacttttacgccagaagaaatatgtgagcttacggtagaattctataaacgtaattatatcgagggtctgtttttgagttccggaatcttaaagaatccaacttatacaatggagaagatgtgcgagacactattgctacttcgcacgaaatatcattttaatgggtatgttcatatcaagacgattccgggagcctcagatgaactgttggcagcggcagggtatcttgcggatcgtattagtgtcaatcttgaattgccaacagaagaagggttacgtacattggcaccgaacaagaccatgctgaatattttgaatccgatgggaaaagtccagagcacaattgcatctcacaggatggcgattggaaagtctgcatatatggagcgtagcggtggaaataaatttttagataccgggattttttcagatacttcgaaaaagcagttttccgagcagttagatactcagacgaataatacagcaatttctcaagattctgagatgaagcgattagaatcttatagaagatatactacattggatcatgctttaacatgggaaaatgcgaatcaattagcaccacgtgatatgtcgcaattaaaacgcagttttgctccggccggacagagtacccagatgatcattggcgcgaccggtgagagtgattatacattattgcagacaacacaggcattatatcaaggctttgatttgaagcgtgttttttattcagcatacattcctttgaacgaagacaatgtattgccggagataggaacaccacctccgcttttgcgtgaacataggttgtatcaggcagactggcttcttcgtttttatggatttcatgcaggagaactattatcttcggaacagccgaatttcaatgagatgcttgatccaaagtgtgattgggcacttcgccatttggagcagttcccgatagaagtagaaaaagcaaattatgctacactgcttcgagttccgggaatcggaccgaagtcagcaagccgtatcacttatgcaagacgctacggcagacttgattatgaaagcctgaagaagatgggagtagtactgaagcgtgcacattactttatcacttgtggtgggaaacagatgtaccatactcctattgagacatcttatattacacgacaactaattagtgtagacaagaaagatatttggaatacacaacatgcgaatgagtcattcacccagatgacgttgacagattttggagtatgctaatgaaagtttttacttgtaaagatcgtttggaggatattatgacctgcatctatgatgcgtggtctgaagccttacaaattggtcacgaccagatacaattaaagaaagaaccgatatttcagcagacgatatttgatgaatatattcacgtagatcaagatacttccaaggcagaaaaagtgattcgttcgatacgacgagatatttctgatgaggcatatctggatatttatctggcaacattatctgcggaggaagatgcactgcaggcaatttataatttccttcgggtcgggttttcgatgggtggcaatgcattgaagcaatatgcgaatccgcatgtgatgcgaatattagaattacgtcgcaaagtatccaatgaaagtcatcattttagagagtttacacgatttgagaagttgaattccagtaatgtatatgtcagccatctagaaccgaaaagtgatgtcattatgttggtaggcagacattttgcaaatcgcatgccttcagaacagtggatgatcatagatgataatcgtaaaacagcttgtgttcatccaaaagatggtgagaactatcttcgctatatgacagatgaagaatttcagacattaagaaagacagaagagtacaaagatgagtatacggatatgtggaagacattttttcacgcgattgtgatagatgaacgaaagaattatgtatgtcagcgaaacttatttccgctatggaaaagaaaacatgcagtagaattcaaaaaatagacggaactgttatgttgatattatatcaagatttaacaaagatataagcttttcttatatgttttcacttgtatctcataagactgaaacgtataatgtaggaaagatgtgattgataggtgattctttttcttgatcggaggcgataatatatgtcatatgatttatcaaaacctcttgtaataggaattagttcgagagctttatttaatctcgaacaggaaaataaaatattcgaagaacaaggtgttgaagcatatgaggcttaccaggtagcacatgagaatgagattcttcagaagggtgctgcttttcaattgatcaaagcattcttagaattaaacaacacagaactgggaagactggtggaagtgatcattatgtcacggaataatgcgaacacatgtcttcgtatttttaattctatacagtattatggactggatattacaagagcgactttgacaagtggtgccgagatagctccttatctaaaggcttttaagacagacttatttttgtcagcaaattctgttgatgttcagtctgcaatcaatgatgggattgcagcaggccgtattcttacaggtgatgcgcatgctgatccgaagcaaaagattaatcagatccgtattgcttttgatggagatgcagtactattttctgctgaatctgaaaagatttttcagaagaacggaatacaggcatttgaagaacatgagaaggcaaatgcgaacacaccaatggcgaaaggtccttttgcaaacttcctgacaaaactgtcttatgtacagcagatgtttaaagaaaaagagattcagccaatccgaacagcacttgtcacatcaagaaatgctccagcgcatgaacgcgcagtcaaaacacttcgcaactggggtgtatcaatcaatgaagcgttcttcttaggcggtgtcagtaagacagaagtacttacagcatttggagcacatatcttttttgatgaccaggatatacataccgaaccggcttcagcggttgttccggcggccacagtgccttatagggatggagataatccgaaagaataagcaacggctatattattttgaaggtgatgggggaaaacaatgcagacatatacatatgtttcaaaaggaaaatttgaattaacagaaaaacctaaaccggtgattatgcatgaaagagatgctattgtaaaggtgacgcttgcaagtatctgttccagtgatttacatatcaaacatggaagtgttccacgcgcagttccgggaattactgtcggtcatgagatggttggaattgttgaagaagtcggagacgctgtaactcatgtgaaaccgggagacagagtaacagtaaatgtggagacattttgtggtgaatgttatttctgcaaaaaaggttatgtcaataactgtacggatcagaacggaggatgggctcttgggtgccgtatcgatggcggtcaggctgaatatgtgcgtgtaccatttgcagatcaggggttaaataagattccggatggagttacagatcgacaggcattattcgttggagatgttctggctactggttattgggcaactcgtatttcagagattacagaagacgacactgtactgatcatcggtgcaggaccgacgggtatctgcacattactatgtgttgtgctaaagcatccgaaacacattattatgtgtgaaaaagatgaggaacgtatacattttatcaatgaacattacccagatgtacttactatttctccgaaagaatgtgagacttttgttaagaatacaagtgaccacggcggtgcagatgttgtcctggaaattgcaggtgcagagtctacatttcgtttagcctgggaatgcgcaagaccgaatgctattgtgacagttgttgcactttatgataaagcgcaaagcttaccacttccagacatgtatggcaagaatctcatcttcaaaaccggtggagtagacggatgtgactgtgaagaaacattgaaactgattgctgaaggaaaaatcaatacagaaccacttatcacgcatacctatactctcagtgaaattgaagcggcatatgatctcttcgagaataggagggatggtgttataaaagtagctgttgaatgttgacagatttgtttgcggttaaaatgtataaaaatacaaaaaatgacaaaaaaattgatataatatataaatttttagttacttttccggcattctatggtacactaacatggtatatcaaaaaatgtgggaggagactcaaaaatgagcaaaaaagaaggaaaagggttaaagtcttttaacaagggatttcaagtgcctgacacttacattattatctttctggtagttgttgtcgctgcacttctgactttccttgtaccaaagggattttacgaaacacaggatatttcgtacatgattaatggtgttgagaaaacccgtacagtaatcaaagacggaagtttccagtatctgacagatgatgcaggaaacgtagtaacagaaggagtagcactctttagtggagatggtggaacaggattcttcaactatatgtataacggaatcgtaagcagttctgcaatcgagattatcgcattccttatggtagtaggtggtgcatttggtatcatgatccgtacaggagcgattgaatccggattgattggattgatccgtaaagcaaagggagccgaaaaactgctgattccagtacttttcgtactgttttctcttggtggagcagtttttggaatgggagaagaagcacttccatttactatgattctttgtccattatttgtagcagttggatatgactccgttatcgcagttcttgttacttatgttgcaacacagatcggtttcggttcatcctggatgaatccgttctctgtaggtattgcacagggtattgcaggaattgacgtattctccggagcaggattccgtatggtaatgtgggttgtatttacagctcttggctgtggaatgacgatgttctatgcgtcaaagattaaaaagactccgacaatctcaattgcatataagactgacgcatatttccgtgaacagaacgaaaaaacaggtattgacgaaggacattcctttggccttggacacattttagttcttctgacactggctgctacagtagtatgggtaatttggggagttatgactcagggatactacatgccagagattgcaacacagttctttattatgggaattgtttccggtgtgatcggagttatctttaagctgaacgatatgagattgaatgatattgcaacttctttcaaagacggggcaaaagatctgatcggtgcagcacttgttgttgctatggctcagggtatcatgcaggttcttggcggatctgatccgactacacctacagttatcaacacaattatgtataatatttcaaatgcactgtcaggagtatccggagcagttgcagcagtacttatgtatctgttccaatccgtattcaacttcttcgttgtatccggaacaggacaggctgcgatcacaatgccgatcatggctccactgtcagacctgttaggtgtatcacgtcagacagctgtagttgcattccagcttggtgatgcatttacaaacctgattgttcctacatcaggatgtctgatcggatctcttgcaattgctaagatcgagtggtctaactggatcaagttcatgtggaaattcctcggcgtattgatgattggtgcaattattacagttctgattgctgtcggaattggattctaaaacaggcatttgatgattgaaagtgatttaagatgaaattaattcagaatattgatgtttatgccccacagcatctggggaaaaaagatgtattgacgatcaatgacaagattgtgaacattgcagaagcaggttctatatctgcagatggtattctttctgacgcagaagtgattgacggaaatgatttaattcttactccgggattcattgatagtcatgttcatgtactcggaggcggtggcgaaggtggattcgccaaccgtactccggaagcaactatagaaggacttacgaagtttggagtaacaacagttgttggctgccttggaacagatggaatcggtcgtgatatgtgtgcactggttgcaaaaacaaaaggcttgaatgagcagggaatgtctgcatactgctatacaggcagttaccagattccggtccgcacattgacggacagtattgtaaaagacattatgatgattcaggaaattgttggaacaggagaaatcgcgatttcagatcatcgttcttcacagccaacttttgaggaatttgcacgtgtcgttgctgatacaagacttggtggcgttctttccgggaaagctggtattgtaaatgttcatcttggcgacagtccgagatgcttagatcttattgaacgagtggtagatgagacagaaataccggcttctcaaatacttccaacacatatcaatcgaaatgagatgcttttctgtaagtcgattgagtacgctttaaagggcggagcagtagattttacgggaaatgaagatattgattattgggagacaatttgtgatgaggtacgtgtatgtaatggtatcaaacgtatgcttgacgcaggagtgaagccggatcgcatgacaatttcttctgatggacagggaagccttccgatgtacagcagtgacggtgaattccttggaatgggcgttggacagtccagctgtcttctcaaagaagtaaaagaatgtgtatttaaggcagagattcctttagaaatagctatttctacgatcacatctaacccggcagagattcttcgtctcaaaggaaaaggtaagattgaagagggctatgatgcagatctttgtatcttggatcaggaacttcatcttgttgaagtaattgcaaaaggcaatacactttataaaaaataaaggtaacttgatgtcagaagcatcggtcattcagttggctggtgcttttttcaacattaaatttatttttcagagcactttatgatataatggactcgtagtcttttacagacataagaacggatataaggagaatgtactattgatcaatcagacagcaaagaaaattttgaaagcattatcttttgatggagtagaagtggaagcatttcgtcatatggcggatttaaaacgactggatccaatgaagattttttataagaaagtagacgagaaaatatataacggaagtcatgcagttccgattcgaatattttttccaagcgagaaaagctttcgagaaagtgaagaaaagaagcacgatattcaggataaaaaattgcttttgttcatccatggcggcggctgggttacagaaagtattgataattatgaaagaatttgcgcccggcttgcagatgcgaccggacaatatgtagttgcagttgaatacagactggcaccggaagataaattcccggcaggtctggaagattgttatgctgttgcaaaagcggtatattttggagattttatgttaaatataagaccagaaaacattactttgatcggagacagtgccgggggaaatctctgcgcagcactatctttgatggcaagagaccgcggggaattcatgccaaaaagacagatcctgatctatccggctacatataacaattatacagagacttcaccatttgcatctgttaaggaaaatggaacggattatctgctgacagcagggaaaatgcaggattatattgatctttatgcgagaaatgaggaggataagaagaatccttattttgcaccatatattgcagaagatttaacgaatcagccggatacattgattcttacatgtgaatttgatccacttcgagatgaaggggaagcgtatggggaacgcttgaaagaggctggaaatcatgtggagatccatcgtatcaaagatgcacttcacggatattttgcattagggatcaagcagcttcatgtacaggaaagtttcacctatattaatgaatttctgaaaggggaaacactgtgagtaagaaaaaagcacgctggagaaagttagataatgcagcaaaattatattctgctgccagtaataaaaaagatacgcgagtattccgtttctactgtgaattgaaggaaaaagtagattctgacgttttgcaggaagctttgaatcagacgatagaaacatttcctacatttctaatggtgcttcgcaaaggattcttctggcattatcttgagccatgtaatttgcggccgattgtaaaagaagagtacaaagaaccttgcagcagactctatataagagataagaagacactgctttttgaagtgacctattataaaaaacgtattaactttgaagtgttccatgtattgacggatggcacaggcgcaaccgaattcttaaaagagctggtaaagaattatttataccttgcacataaagaagaaggattagaacaggttgcactgctgccggaagatatgacggtacaggatcaggaagatgacagtttcttaaaatattattcaaaaaatcaaaaacggccgaaaaaaagaaaactgaatgcttttcagatacgaaggaaaaagaaagatggaaatcatctgcatgtccacgaatctgttgtttcagttcaagcagtattaaagcgaagcagagaactcggagtatctatgaccatctttctgacagcattatttatgatggcgataaatgaagaaatgtctaagatgcagaagaaaaaaccggtcgtgttaatggttccggttaacctaagaaagtttttcccgtctacatcgatgttaaatttttttaactggatcgaaccgggatataattttacaacacaggatcaaagctttgaagcagttctgaaatatacgaaagaattttttgagacagaattaacgaaagaaaaaatgtcagcacatatcagcgagttactagcactggaattgcatccaattctgaggcttgcgccattggaacttaaaaacctttgtattcaggcaggcgcaaaatattcggagaagaatacaacagcaatattttctaatatgagtgcggttaaaatgccagagagttatgtgccttatattgaacgatttggcgtgtatacaaacactccaaagcttgagttgtgtttgtgttcatttcaggataaattatcatttgcatttacatccagatacgatacagtgaatatcgaacgtaacttttatcggttgttaaaagaacagggaattacatctgaaaaagtaaaacctgaatttccaaaggctggtaagccaagcgaactggaaatgaaagtctataagatctacagctttctgtgtattgcaattgttgcggcaatgcttgttacggatttgaatttccacccaagaattcgctggaccttatttacagcaggaggcgttgtgacaatgtggattgcctcgtcaatcggattttttaaacgatataatctgctgaaaaatgcgatgtggcagcttattatcggtacaatcatctgttttgtatgggatgcactgactggatggcacagctggtctgtagatcttgtgttgccaatcatgagtgtatctacacttgcagcaatgtttgtaaccgctaaagtgcagaaaagtccggtgcgagagtatcttatttatgaaatcatggctgccggatacggattgatccttccggtaatcttgcttttatgcggggtggtaaaaaatccaacagtgagtatgtttggagcattgacgtgtttcttattccttgtagcagtgattttgttcaagggaagagagtttaaagaagagatgcagaaaaatctgcatgtataaaaatcgtctggaagtaaagccgggacataaagttgcatgtcataaatataacagatgttaaaaataatcaattttattaatgaaatagatattaaaaaggcgttactcattcctaagagcagcgcctttctcatagttgtatattcaaagataaaaatattatttggtcaagtctaagtttatctttattctgaaaatgtagaatatattttcacaagttcaatgatcatattaacaaccttatccatactttgtgcggaaatgtgttcataaggtccatgatagccataagctcctgtaccaatgtcaggacatggaagaccgcgaaaactcagctgacaaccgtcagtgccgcctcggatcggtgagataattggagcaagtccggttctttcacaggcaagttttgcgttatcaatcaagtgcatatgttcttcgatgatatttttcatattatagtattgatcttttatatggagttcaaccgtattttctccccattttttatttaactcatttgtaatatcaatgagtttatcttttctgtattgaaatttttctgtatcatggtctcggacaatataatttaacgtggcgtgtccgcaatcgccattcatattaatcaggtgatagaaaccttcatatccttctgtgtcacgaggtgtctcgtgtaaaggaagcagactgttaatttccatagcaagaaggcaggcattgatcattgtatctttggcagaaccaggatgcacacttaccccatgaatatcaaaagaagcactgcatgcattaaagttttcatactccagttctccctctgtagaaccgtccaatgtataggcaaaatctgcgccaaacaactcaacatcaaaatgagaagctcccgtgccaatttcttcatctggagtaaaggcaatggaaataggaccatgaggaatggattctttctgtaaatgctcgactagcgtcatgatctctgcaattccggctttatcatcagctcctaagatagtatttccatctgttgtaatgagcgtgtgtccctttaatgattccaaatgtggaaacattttaggacttaaggtcaatccactattgccaagagcaagctctttaccgttataattttctgtgataatcggacgaattggctgctcacagtaatcggctacagtgtccatatgggcgataaagccaatagcaggtgcactctcatatccttttgttgcgggaagttccccgtagaggaaacaattatcagtcagctgaatatttgaaactccaagcgcttccatctctttctttaaaggattggccaggtcaaactggcatgcggaagaaggtgttgaagtgctggtttcatcagaaggggttttgataactgcatactttagtaaacgttcataggctttcataaaattctcctcacatgtaatttgttgggtatatcgtatcatatttggaaggaagtgtatatttgaaatctgaaaaagtacgtttttatccgtataggaaaattggtattcttaacagtgatgtggtatactggacaatagattgacgttgttttttcataagtagatagagaaaacaaatatgatatgtggagtaaaaactatggttataaatgagaattgtaaagtatgtcagataaaacgaaatattgataagtacccactcaatgcgactgaagaagaaataaaagaataccaacataaagtgaaagaaattgtagaaaatagtgacggattatctacacctcaggttgcagaaaaaatggatgaccttcggcgaaagatttttggaaatgtaataaattatactgaaatcaaacagcattataatcaattaatgctcgattactttccgtatatgaaaaataaagttgatacatctgaaaatcatttaaaaacagcaatacagtatgcgatggttggaaactatatcgatttcggagctttagaaaatgtaaatgaaggtgaactgaaagttcaattagatgaagcagtaaatataactatagattctaagctgttagatgtatttaaaaacgatttggtcaatgcaaaaaggctggtttattttactgataactgcggagaaattgtaacagataagttattgatttcaacctttcgcgatattaatcctgatttacatataactgtgattgtaagaggaaaaccggttttaaatgacgccacattggaagatgcgaaacacattcacatggaagatgttgcgcaaaaggtaatcggaaacggtacaggattgccgggtaatgtgatcggagcaatatcccaagaagcaatgacagaggtagagaatgcggatctgttaatttctaaaggtcagggaaattatgaaggattaagcggttgcggattaaatatctattacctgttcttgtgtaaatgtgagatgtttatgagacgatttggtgttgaacagtttacggggattatgacaaaagaatgagccgttgaatgatattgatacaatgatgggagagtaaaaatgattatcagaaaagcagaagaaaaagatattccaagaattttagagctattaaaacaggtgttacaaattcatgcagatataagacctgatatttttattccgggtacgacaaaatatactatagatgaattggcagaacttctgaaaaataaagaaaagccgatatatgttgcagtagatgagaacgatgtttgcagggggtatgcattttgtcaattgcaggagcagcctttttcaaataatatggtgccatttaagtctctttttattgatgatctatgtgtcgatcaagaggctcgaggccagcatattggcgaaagtctgtttgaatatgtaaaaagtgaagcgaaacagctgggatgttatgaagtgacattaaatgtatgggctggaaatactcctgcagaaaaattttatgaaaaaatgggaatgcaaacgaaagaaagacaaatggaatacatattataaaatagttttcacttcggggattacaatcaataaagccggtggaggattttgaatccagtaccggctttgttgaattgatagataactcgaaagcttatgcaactgtaaaggtgctgaaccgttaaaactttatttgctatggttcatcagtgctttaatgtcttcttccggtgtggtaataggtgcaatgccataattctccactagaaaattcagaatattaggagacaaaaacgccggaagagaaggaccaagacgaatgtttttgatacctaaatgcagaagcgttaacaagatgcagacagccttctgttcgtaccaggagagaacaaaggagagtggaagttcatttacggaacatccgaatgcatctgcaagtgccacagcaacctgaatcgcaccataagcatcattgcactgccccatatccatcagccgtggcagaccaccgatttctcccagctcaagatcattaaaacgaaattttccacatgccagggtgaggacaatactgtcagaaggtgtctgttttacgaattctgtgtaatagtttcggcccggtttggcaccatcacagccggcaaccaggaagaaatggcggattgctcctgattttacagcttctactacagtacctgcatgagacagaatagccgcatgaccaaaaccggttgtcacttttttaccgccattgatgcctgtgagtatttgatcttccttgtaaccacccagttccagtgccttttcaataaccggcgtaaaatctttcttttcatcaatatgaacagcacctgggaaagcaaccatttctgttgtaaatactctgtcagcatagctgctttttggcggcatcagacagttggtagtgtagagaatcggagctggaagatgatcgaactctttctgctgattctgccatgcggttccaaaattcccttttaaatgagagaatttttttaagaacggataggcatgggcagggagcatttcaccatgagtatagatgttgattccttttccctctgtttgttcaagcaaaagctgcaggtctctcagatcatgtccggtcacgacaataaaaggccccttttctattgtaagtgtcacatcggttggttctggtattccataggtttctgtatttgccttgtcaagaagtgccatacacttcagattgatttcccctactttcagtactgtaggaagcagagtttccacactctccccataaccaatcataaacagtgcttcgcagaagaatcgattcacctcggcatcttcataattcagaacatttgcatgataggcataggctgccatcccacgaatcccaaaaagaataagagacttcagagaacggatatcttcgttggtatcccacagctgctgcatatcgtattcatctgttttaccgcatggtgactgacatttgctgcagtcaggaaccagtctttctttttcagctctgactttttgtatcatgttttcaattgatgcatcgtcaaaattcacatttgtaactgtagtaaacaatccttcaattatgatttgcccggttcttttagaaatagcagttgaaccgtcaacagctcttgcaaggctgatcaacgcacctgtcagttcatcctgtaatctggctgtatctgctttttttccacaggcgccggcatttcctgtgcagccggtacatccgactgtctgttcacactgaaaacaaaacattttcttatccattattgcattctccttctttttttattctatagttttcccatcaatacctatcgttataacctgccatggtaagaattttccactattttgaagcgctttttttgctgccatctccagaccaccacagcaaggaacttccatccttacgatcgttacgctttggatgttgttattttgaatgattgcagttaatttctcactataatctacctgatctaatttaggacagccgattaatgttaccttattctgaataaaatccttatgaaaacttgcataagcgtaagcagtgcaatcggctgcaattaaaagctttgcaccgtcaaaatatggtgcactgactggggcaagtttaatctggactggccagttctgaagttttgatacagaatctacggttgaagatggttttacagactcaggtgtttctgtccgccgaatctgcatgattttagatcccggacagccggagtgagaggacattgcctgattttgagtaactatttttttctgtgcttcttttacggcttcttcgtcatatgcaggagcttccctttcttcaaaagaaatggcacctgtaggacattccgggagacaatcaccaagtccgtcacagaaatgttctctcaccaattctgcttttccattaatgatatcaatggcaccttcatgacaggcatctgcacagacaccacagccgttgcatttttctttatcgattcgaataatctttcttatcatttttaccctccatttataacatttcacttttgtttctgctagaatcatagtataataaatacaacttgtatgtttgatttccaacaggaggaacgattttgaaaaaatatttgcctattctaagaaacagtccattcttcaaaggtcttacagataacgaaatattatccatattgcattgtgtaaatgcaacaataatttccaaagaacgaaattcttatattttcagagcgggagattctaccgaggtaatgggacttgtgctgtcaggctgtgttcttgtgattcaggaagatctctggggacatcgaaatattctgtcaaaatgccataccggtgatttctttggtgagccatatgcagcaagcccgggagctgttttaaatatcagtgtgatagcagatgaggattgtgaaattatttccctgaatgtccagagactccttgtttcctgcccgacggcatgcgagcatcatcagaaactgatccgtaaccttgtcagtgtcctggcgaataagatactgatcctgaacgataagatcacccatgtcgggaaacgaacaaccagagataaactattgtcgtatctgtcagcagaatctatcagacattcgtcgttatcttttgatattccttttgaccggcagcagctggcagattatctttgtatagatcgtgcggcaatgtctacagagatatcaaagttacaaaaagaaggctatctaaaaacaaatagaaaacattttgaattgactgtttctaatgacacagattcaggaataaaaatgtgacatgtgtcacagaaaatatagaatcaattcaaaagctattctatagtgcaagaggaggaagcattaaaatgataaataaattacatttggcaatgattgaattatacagaggagatgcaaagaggattcaacatttttgtaaagtacatagttatgcaaaattgatcgcagaaacagaaaatgtagataaggaatgcttgtttatcattgaagcagcagctttgacacatgatattggaattcatttctgcgaagaaaaatatggaaactgcaatggaaaattacaagaaaaagaaggtcctgcaattgcagaaaagatgctcaaagaattaggctttgatcaggatgtatctgatcgtgtccagtatctgatcgcacatcatcatacatataataatattgatgaaattgattatcagatattggtagaggctgatttcctggttaatattatggaagatggtttatcgaaagaagctgctttaaaagcttgtgaaagtattttcaaaacaacatgtgggaaaatgatttgcagagagatgtttgatttttgcagttgattatcagacgaatactgagaccagctgtgaagataaagcagcatttaaatacggcaaaacaaaagtaagatatcgaaataaagtttcttctgaaaaatgcacttacggataatgtaaatgatcgagaaatttatatgaagggtatcgatcacagttattactatgaaggttattatgtgtttaaaatggaaaatttgacgaacataaaggattaacttgatttagcgttagaaaagaggatgtgaatacatgcttatttatgcaggtacaaaaagtgattttatgattgatatagagaatgatcgtttggaaacaaaattatatgaaaatataaaattaaagatgaatcgaacgacaggactaagtgagctgaatgcctggcggaattcattaaaagaaatgtatattacattgaatgattccgatattccaaaggatgcaggtgtggcgattgaatataatattccccagacttcaaaacgggtagattttcttatttccggttatggatggaatggaaaaggaaatgttgttattgttgaattgaaacaatgggagaaattagcatctatagatggtcaggatgcaattgttgaaacatatacgggtggagcgaaccgaagagttgtacatccatgttatcaagcatggtcttacgcagcgttaatcagggattataacgaatatgttcaagacaacgaaatcgctcttcatccctgtgcgtatcttcataattatccaagaagtgaaaatgatccattggataaagaccaatatcaggatattatggaagaaacacctgcatttacttacgggcaaagagaatctcttcgtacatttatcaaaaagcaaattgtaacaggtgacaaagaggatacattactgaaaattgaacatggaaaaattaaaccttctaaacaacttcaagacgcgcttgtaaatatgcttaaaggaaatcaagaattcgtaatgttggatgaacagaaggttgtatatgaaagtattcttgattattcctgtcaatgtcaaaaagatggtaagaaaagaacgattattgttgaaggtggtcctggaaccggaaaaacagtcgttgcaattaatctactggctgaactcacgaatcgcatgcaatttgttcaatatgtttcgaaaaatgctgcacctagaacagtctatcagttcaagttaaagggacacatgaggaaaaatagtgtagataatctctttaaaggttccggaagttataccgaagcaccaagaaattcagtcggaacattactggctgatgaagcccaccggcttaatgaaaaatccggtatgttccaaaacatgggtgagaatcagataaaagaaattattcatgccgctgcttgtagtgtgttttttattgatgaaagtcagagggtcacactgtcagatattggaagtgtcgcggaaatagaaaagtgggcggccttggaaaaatcagaagttattaaaatgcagcttgtttctcagttccgctgtaatggttctgacggatacctggcatggttagatcaggcgttggaaatccgtgatacagccaattatgatcttgacggaattgattacgatattcgtatctgtgatacacctgcagagatggaatcaattgtggttgaaaagaatcgtgccagaaatagagcgagaattctcgcaggttattgttggaattggccgaaggctaccagaaataatacaaattatcatgacatcgaaattggagattattctataagctggaatctcgatggcggagatgcttttgcaatcagtgaagagtccattcatgaagccggatgtattcatacatcgcaagggctagaattcgattatgtaggtgttatcattggtgacgatatgcgatttgaaaatagtaaagtgatcaccgactacacaaaacgtgcaagaactgataattcattaaaaggaataaaaacactggcgaagaaagataaagaaaaagctgatcaggtggcagatgaaattataaaaaatacataccggacacttatgacgagaggcatgaagggatgttatgtatattgtacagataccgccttggcagagtatttaaaaaagcttttgaaacaaaaataatgaggtagaatttcatgaaagaaaaaacaatagagcgcattcgtaaatttacagaagatcgagactgggatcaatttcatagtccggcaaatcttgcaaaatcgattgtgattgaggccgcagagttattagagtgtttccaatggagtgatacagagtatgatctgcagcatataaaagaagaactggcagatgtacttgtttactcacaaaatcttcttgataaattggaacttgatgctgatgaaatcgtaaatatgaagatgaaacagaatgaagcaaaatatccggtagataaagcaaagggaaatgcagtgaaatatacggagctgtaggccgtttatctcatagtttacggaggtgacattatggttataaatgaagaatgtaaaaaatgtcagataaaacgaaatatcaataaatatcctgttaatgcaacagaagaaaagataacagaatatcaatataaggtgaaggagattgtaaagaatagtgatgggttatctacaccacaggttgcagaaaaaatggataatcttcgtcaggaactttttggaaatgtgatggattatacagaaatcaaacagcattacaatcaattaatgcttgatcaatttccgtatataaaaaataaagttgatacatctgaaaattatttaaaaacagcaatacagtatgcaatggttggaaactatattgattttggagctttagaaaatgtaaatgaaggtgagctgaaagctcaattagatgaagcaataaatataaatatagattctaagctgttggatgtttttaaaaacaatttggtcaatgcgaaaaggctggtttattttacggataactgcggagaaattgtaacagataagttattgatttcaactcttcgcgatattaatcctaatttacatataactgtgattgtaagaggcaaaccagttttaaatgatgctacactggaagatgcaaaatacattcacatggaagatgttgcacaaaaggtacttggaaacggtaccggattaccaggtaatgtggttggagcaatctctaaggaatcaatggatgaggttgagaatgctgatctgttgatttctaagggacagggaaattatgaaggactaagtggatgcggattaaatatttactatttattcctgtgtaaatgtgaaatgtttatgagacgtttcggtgtcaaacaatttacaggaattatggcaagagaaaataataaaaagtaatacttactccttaaagatttatccaagacgaaagatatcttagaaaaaaaaggtgttacagaggcggttaataattgcgattaaataccgttcatctgccacggcactccagttttatgataatgcataccttcgcagaatggggcaagtcagggcagaataaggcggaaagcattggaattactacggtttcgactactaaggcacatgggcagaatcgagattaaagcagatgtgtggggagaaattcttagtagtaacggactactaacagatgacatagcatattctctgcagtacaatgccaggtgttaatgtaacgattaaatgaaatttattatttccagctactataataaaagtaaaaaatttggaaatttttattgaaaaaatagaacacatgttctataatacggtatataatttagcaaactgcagagaggggcattttatatgagcattatatctacttcaataaatgatatgaaaaaattaaaatctggtgattcgttttggattaatggcgagatgcatagagcaattggaaatgcacatatgtcaggggattccacgtgtgaagaatatatagtgtatgatgaaaatggagagggatggtttgaaacagatttttctaattgtaatcacaaatattgtccatatggtggatgtatctagaatatgcggcgtcaataaattgacgtcactgtgtattgagtgtataatttgtgtgtcacaatgtttcacacttttttgggggggggaaatttaagatgatacaagagaaagagtttagagtatggttaacagaaaattatacatattcaccagctgtagttggagatattgtctctcgtattaaaagagcaaatcgaattttagagtttgatttagatgacgcatatcagttttatttagaacatgaagaatcatacaaggtattgtcggtttctgttcgttcacagataaaaaaagcggtgaaattatatcaagcatatatgaaaaaaggatgaagtaaataaatgagaataatgctattaagctttaaaccgagcgtatataataagttgctttcaggtataaagatttacgaacatagaaaagtgtttcccgatgaaccaataaaggcgtatttatatgtcagttatccagtatgtgctattacaggaattatttattttgggaaaagaaattcaattaaagaatggaaaacggtttactcatatgatgaggccgctgtaaaaagaattgataactatcttttaactcaaaaatatgcaatagaaattgtaaagtttaaagaaacttcatcaataccattaaacatattacgaactgatttaaaaaagtttgtagtaccgcagatgtattattacatagatgaagattcggaattattgaagtatttacaagataatattaagccgacaggaaaaacaataatacacaagtttgacaatatcacatctgatgatatttgtgtgaactagagaggatactattatggataaaaataaacctagattatttggtattgatcgttctaacagagattacaccaacccagatacttggggaaagaaccaatttaactcatcatttccagcttccttagcgtgttatttgtattctaaggggctaaaggctgtatactacaaggcggataaaaacatgaatagagatttgcagtatataggaattgatgaattatacggggtggatccgttaggagacgatatttatttttcatttgaaacacaatacatgccatttcagaaatatgttgtgggttcaatcccaagagatgatttagtcatcctctcaaaggggcagtgcgttagcagtatggaaataaagttggttgcattgccagataatcctacttgtaatcttagtgaggataagtttggctctgaaattgttgttcgaccagacacaattatttatcttgcctgttcgttcattcagagttacgatgatgacccagaggcagtaaagaaggttataggtgatgcaggaaaaagcataaaagattggactcaagcaacggatgttcttccatatattgatgaaatctactgggctattagacgtatgattaaggagaagaacgataaacaggtgcctattattatggagccggtatggaaaacagaaggcaagtcatcaaaattagctgataattgtctcgatgtttttgtttggagtaattttggaatgttaaacctttttatgccagcagaaggagatgcgctaacaagtataacgagacatacacgaacgatgatatggttatttaagatgttgaaagattactctgaaaacggaagattcgatggtggtaaggttattgatgagttgtcttataacttgaaaaacgataaggcatttgcatctaacggacccaaaacgcatccagtaatgacctgtgctgaattaactaagccgagaattagaaaagacgagataaaaaaaataattttaggtggaggacagaacttgttgagtcctgaaagaaggtttgatgcaattatttataattcaccggatttatttaaggaggaataacaatgccaagagcaattgatttattttgtggttgtggcggactttcattaggatttcagaatgctggatttcaaatagttcatgcatttgataattgggataaagcagtaaatatatacaatacaaactttgatgatcatgaggctgagattctggatgtatataaccttacaactgaatatctgaatacatttagaccagatttgattattggtggaccaccatgccaagactattcatctgcaggacatcaggatgaaacgcgaggtagggctaacttaacgataagatttgctgagcttgtgtgtgaatcaggagtgcagtggtttgtaatggaaaatgtagataggattgaaaaatcacagacattaccaaaagcaatagcaatgtttcgggatgcgggatatggattaactagagttgttttagatgcatcacgttgtggagtaccacagaaacgtaagagatttttcatgataggaagattaggttcggaagatgacttccttgaacactcgttgttaagtgaccaagatgatcataatatgacgattcgagaatatttgggtgatgagtttgacacggagttttattataggcacccgagatcgtatgcaagaaggggaatatttagtatagacgagccaagtccaacagttagaggggtaaataggccaatacctgcgacatatcagattcatccaggcgatgcgactgatgacttgagtcgtgttagaccattaacaacattggaacgtgcaagaattcaaacttttcctagagaatttacttttgaaggtagtaaaacagatcttgagcagataattggaaatgctgttcccgttgaattagctgcatacgttggaaggcatttattagattacatgaatgattgcttagtggaggatttataatgaggtattagttgatattgaactgagtaatgggacattcgtttgatattataaagtcagagaagatatacgttcattaatggaaaggagagtactatgggagaaagaaaagcattagttgtaggaattaatgattatccgacctgtccgcttagaggttgctgtaatgattcagaggcaataaaagatttattaagtaatcatggaaatggtgatccaaacttttccgtttggaaaaaggacaatgttgcaacaaagggtgagttgagaggcttaatagagaaatgttttgaaggtgatgcagatgtagcactattctattattctgggcatggacatattgatgcagttggaggatatttagttacaccagatttttcagaaaatgactatggggtatcattacaagaaattctgacgattgcaaataagtcaaaatgtaaagagagaataattatacttgatagttgctattcgggatttatgggtagtataaatacggatggacaaaacacagcgaatatcaatgaaggagttactattatgacagcaagtcgaaatagtcaaacttctatggaagtaaatggacatggtgtatttacttcgttgctgatagaagcgcttaatggtggtgcagcagatgtgacaggacatatttctattgcaggagtttatgcatttatagataaggctttaggtccttgggaacagagaccggtattcaagaccaatgtgacgagatttacatcgttgagagaagtacagccacaggttgatatgacggtattaaggaaaattgtgaattactttaaaagtgaagattatcaatatgaactaaatccgtcatatgaacctaccaatagaagtgaagtagttcataatgttattgagccatatgcaaaggatgaaaatactgctgttttttcagatttacagaagttggaaggggttggtttagtggttcccgttggagaggaacatatgtattatgcggcaatgaattctaaagcatgtgaattaacagctgtaggaaaacaatattggcgattagtaaaagaaggaagaatatagggaggaatgaatatgccaagtttaagagattatcatattttaattagtcattcatgggattacagtgctgattatcagacaattaaaaattggcttaatgaagctaaaaattttgaatggacagattattcggtaccgcttacaaagcctttggatgttaatggaaaaaaagaattgaaagaaaaacttcgcaacagaatatcattatgtagttgtgtaattattctttcaggaatgtatgtttcttatagtgaatggattgattatgagatagacacagccatagaattaggaaaacctattataggtgtgaagccaagaggacaggagagaatacctagtaaggtaagtaataacgcggttgtcatggttggctggaactctaatagtgtagtacaagctgttagagattatgcattgtagtatataatatatgatttagtatttggagtaactgaaaggttgctccttattttttgcatatttttagaaaattatatcaagtatttcttttagatattagaacgataagcaataaattgagttcgtcttttatatgagttttattttgggtggagaaaaaatttatattatttcggtcatttgaaagaaaagtgcccagcgaatagtgagaggaaaattgttctttctgataggaaaatgcaagattctcttactaaaagatatgaaaaaataaaatttttcccgcccaaaatgagattttatgtccaagggatagtgaaggggggaagagagaattcctcattcatgaagaaacaacgagaaggaggttgaaaaacttgaaggtacagtttaacaacatcccggaagggataagaggtaagccattatactgtctcgccaaattggaacaaaagccgggtaagaataagccggataagattccatatcagattaccggagcaagagcatctcctaataatcaaggacactttaaatcacttgcagaaatcgaagccatttttaagaagggtggatatgatgcaatcggcattggagtgtttgacaatatagtggtaattgacattgacaagtgtgttaccaatggaaaactgaataaatttgcaagaaagattgtgaataagctgaaatcttataccgagataagtatctcaggaacgggaattcatattgtggcatttgtatcaggacttgtttttgataagggcaggtactacttcaacaacagaaaacttgggttggagatttatccggctgggtttacaaaaagattcatcatgctcacaggaaatatcgtaaacaaatatgatgttgtcgaatgcacagatgcagttcagtggctgcttgatacctatatggttaagccgaatgcagatataaaagtaacagtaaatgcaccgggcagttatttgtctgatgaaacaattcttgagaagatgtttacttccgcgaacggagagaaaaccaaggcattgtggaatggtggtaacgatggaaaatcagcaagtgaaggtgacttggctctttgtaatattcttgcattttggtgtggaggcgatgaagagcagatggacagattatttcgctcatcttcaagaatccgtgacaagtgggatgatgttcatggtgttgaaacctatgggaatataaacataaaaaaggcaattagaagttgcaaggagttctacaagccacttggtaaaactgtggcaacagaggatttcaatgaattagtttcggtacttattgaattaaagccggaatcaaaccctcgttataaacatggggatttgggtaaaggcagattattcgcagatgtttttaagaatattgcgaggtatgttcctgaacgcaagaagtggtatatccacgatggaattcgatgggtagcagatgttggttcattaaaggctatggaacttgcaaaggatctagctgatgcaattacaatttattccacaaccataaaggatgaggctacaagggaattctttacaaatgattttgtcaagaagtggattccgagaggaatggggcattcggatatttcagtaactatgaatgtatacacacattttggatttgatgatgcagaggaagaactcaagcgaatggaagagtttagaaaggcgcaggcagaagttgaaaagaagaatgagaaaccaatgacaaagaggatgtttaaggcaatatagtatagaagatgggggcactccggcgtatggctggagtgttatttttgtggaaaaattatacacttgttgatataatatattttggattttttatgttggaggataggttatgaatttagagatgaagattaagaatataaatggaatcagtgagtttgattttagttttccattagaaaagggaatatatgcaattacaggtgaaaatggatcgggaaagagtacattaatttcatgtgcatcgacagttttttattcaatgccaatgtatgagcattttggtcgacctttgaatgccacaatagattttgcaattggagcgactactagaagctggcattatgatggaaaaaaatgggaatcgtggaattcgaaagaaaaaatgaagattaatggcttttatgaaggtagcattatttttggtaacaggtttaaggataccaaaatgtctgttattaatcttttagattcgtttacagaaaaggacttatatccggcaggagagttcatttccaataatttggggttaatacttcataatgatatcaattattataaagatttatttattgttaaaaagtcagccgccgatgctaaaggattgactcgtgccacttttttccataaagctgcaaatggtaatcttgtaagtcaaccaagaatgtcaacaggagaaaacttaatgctgagtattcttaattcacttgaaatgcttagaaaaaagagattactacataacgatggaagaccatgcattgtttttcttgatgagatagagttggctttgcattcgtctgcattgcgtagacttattctatttttgaaagaggtagcaaatgaagtggatttatcaattttcttttccacacattctcttgaattactgagagaaataaaggctcagaatatatattatttgacaaagatgtttgatggttctgtggttgttacaaatccatgctatccagcttatgcaactagaaatttatatggtgaagatggatatggaaatgatatggttgtactagttgaggacgatttggcaaagataataattgaaaaaataatggtgagtaagaatattgctcgtagtataagagttaagattttaccgacgggaggttggactaataccattacaatggcatatgatgtcacatcctcaaatcttttaaatagagggacaaaactagcagttgtgttagatagggatattaaggtaaatgttcctgaattcatttctaaccataaacagtattctggtataaaaatagattaccttccaatagcaagccttgagaaatatcttaaagctcacttggtagataagttaaacaatgaattgttttctgtattagatacatatttgtttcagaaaaaaccacttaatgagattattcgtgagtatatcagaaacaataacaaagacgattctgatggtaaggctttttatggagtattgctgaatgaggtaaagtctatgagaaaagatagagaagatttagttgatattgttgttcgatatattcttgaacatgaggaagagaatatcaaagaattagctacttatttatcaaagaaaatagatgaataatccttagtagtaccccctctcgttttactaccatttctactactaagcggtagtaaaactatgcaaaactatgctaaattttgcctcaatctgcatttttgacgcaaaatcataacaaccacaaaatccccgaacccccttgcaaatcaaggcttttcagggcaaaaaggagtaaatcaaaactatgataaaagtcttattcgtatgccacggcaatatattcctttctagaaaggccgtaaagaattgtaagcatataagataaagaaaacccaatacacctttcaacaatacgctccctgctggggcttttgattttataaaggagaacacccatgaaaccaagaacagaaatcagcatacagaaatcagcatgcagctctacaatctgatgatggaacgaggttacccggagaatttatgtgatcttgtcaccagaaatctgaataccgattatacagcaacaaggatgatcggatatttatcccattattctgatttgccggatgtagaagttgtggatgaaatgcttgcttttttaagtgaccgtaacgagcttatcaagaaaaaagaatctgaacaggcacaggccaggatcgtaagcgtccaataagagggtgtatcgaaatttctggctgttgcatgtaaactattgattagagttttgggagttgactctgaaaactctaaatctaatctaaggagcaggcttatggatctttcttctttgactccagacaaacaggtgaaacttcaatactggctggatgtaatacggcaatgcagggcctccggactgacaaatcagatctggtgtgaacaacacgatatctctttgaaaagttattattactggctttccaaaattcgaaagcttgccctggaagaactgccccgcaagaaaaacggcatccacatgtgtacagaccaacattcaactgctttaacggaatccccggctgagtttgcggagctttcacttccggacagaaacatttcccgttccactcctgcagccatacttcatatcggatccataacagtggaactttatgaaggcacatctgcccagatgctggaaaacattctgaaagccgtgcagtcatgttaggagatctttcccatgtggagaaaatctatatccgatgcggctacaccgatatgaggaagcagctcaatggcttgctggatatcatccagtacaacttcaaactggatccttacagcaattccttattcctgttctgtggaaagagggctgaccggatcaaagcagtccattacgagggagacggtttctgccttttatacaaacggtacgaaaacggagcgtctccaatggccgcggaccggcgaagaagcaaaacagatttctgatcagcagctgcgctggcttctggaagcgtttgaacccggagcagccaaaggcggttcagaaatggctccgcataagtctgaaaatactgaaaatccttagaaatgctgggaaatctgacgattctatggtataataatcctatcgaagcgaaagggttttcatgttatgtcagctacggaacaggagtataaaaatcatatcaaagaactggaacagcaggtccggctcctgaaagagcaggttgatttcctgacccgtaaactttatggaacaaaatccgagaagacatctactctcgaaatcgaggggcagatgtctctttttaatgaaatcgaaacctgtgcggatcctgatgcacacgaaccggagcttgttgagatagagaagcacctacgtaaaaggaagtacaccggtcagcgggaagaactggtaaaaaatctccctcacagcaaagtactccataccatagatgaaagggaacagatatgcgataactgcgggagtacgatggtgaaagtaggggaagaattcgtccgcacggaagtacagtttatccctgcaaaactcaaggtgattgaccattaccgggaaacgtatgaatgcaggtcatgccggaaaaacggaactccttatatggagaagcgctcggtgccatatcctcccgtcctgcattctctggcatctgcatctaccatcacctggctcatccaccagaagtttgaattaagcatcccgctgtacagacaggaaaaagaatgggaggctttgggattacgtttaagcagagcgactatgtcaaactggcttctggttgtctatcgggactggcttgtacacatcgtccaccgtctgaagctggaacttctgaaacagagataccttcatatcgatgaaacacatgtacaggtgctgaaagaaccgggacggaaaaatacgtccgattcctatatgtgggtttactgcagcatcagagatgccgtaaatcccatccgctacttcgagtaccagccgggacgaagcgggaaatatccggaagcgtttctgagggaatatgaaggttatatccatacagacgcttactccggatacaatgcagtttcaggagtaaaaagatgtctttgctatacgcatctgcgccgggctttcgtggatgctctcccaaaagacatccataattcggaagcatcaaaacctgcggaagcaatcctccgtctgaatcaactctttaacatagagtcagagttggaggcgttccctcctgatcagaagaaaaaagaacgtcttatccgcgagaaacctcttctcgaggctttttggtcatgggcagaaaaaagtgccatcggagagctgccgaaatccaaactttcaaaagcttttcattacgccttaaataaccgtgaagcgtttttggaattatctggaagacgggaattgttccatcagtaattcgcttgcggaaaactgtatccgtccctttgtgatcggcagaaagaactggctattctccggcagtccgaaaggggcggaagccagtgcaggaatctatacattggtagagacagcgaaagcgaatgggcttgccccgatgaaatatataaaatatatcctgtccgacatgccggggagtgcttttcttgaacatcctgaatatctggatgattatctgccttggaatcctcttgtaaaagaattctgtcgataaccgttgaccttttagtataaaaggctgacggttatttttctatacactgttttatttgacgcttacccagaatcagtgagatttacagatttggattagatattaaatgatagttgaatagataagagggagcaaaatctgccccctcgattatttttgttctaatatatactccaataagccatcgcatccttcatttacatctctgtaagttgcatcaaaattcccagtataccagggatctgcaatatcagcaccttttcgtgatgtgtaatctaaaagtttagaaactttaccatccggatcacctttaagcatgcggttaagatattttatattgatcgaatccatacctatgatataatcgaaattatcataatcggaaaatgtaatctgttttgcacgatgcggtactaaaggaattccaacttcttttagtttgtttactgtacctctatgcggtggattcccgatttcttctgtgcttgtcgcaaaactgtctattacaaactgatcactcaaccctttttcttttaccttataggtaaacacgctttcgcttaaagtcgatctgcaaatattcccccaacatacaaatgctactcttattttcatgatgtacctcattcttctaataaatataccggaaatatttctccctgtctcttatgcctccaatgcataggaaagaagctttttcaaattgtgatggaactgacgtttatatgcatgcagttttttcttctcggaagtggaatagtgtttctccacgtagatatcatatcgtttgaacaaacttcggaaatctgtatcctgtctttgtccccaacggaccagtacccagttcatggcatctatattccagtattcgcttggaattcctgctattttcaatgtggtgatctgacgcattgcctgcatggaaagacggctgagctggcgttcacggtgcatctcatccggatcatttttcccaagctttttcattaatttttgagagagtgtctttgtcttggaagcacgttccattacacgaacactttgatcaatgatatcctggagctgcactgctgcattccagtaagtcacgaaagaaacggattctttctcatcttccggcgtaagtttaaatgtcttaaaaacacggtctgtaactccaaaaatttccagattataagcttttcttttcgccggattggaaagaacccggtaggcttccagaatctcctgcataaaagcagttgtatctatatctttatgcatattggcatccggatggtagaccttagccaatgcatttttcgctgaagtaatttcttccagagttgcatctctggatacacctaagatatcgtaataagtgcgtgagctcattttgacctcctaatattagattccatttttctgaaatcacagaaaatggacagtacctctaatatacgcctgtaaaattgaaaagtcaattctctccagacatatttcccctccatcgctactatactggtaaaagaatagtccatgggggaattgcggatgaagaaaggttttacagtgattctgctgactttttttctgctgtataggattacatttccgacaactgtagtccacgcggaagaagtagaaataagtgcgccgtctggtattcttatggaaatgtctacgggaacggttttatttgaaaaagatgcagatactgcgcggccaccggcaagtgttacaaagatcatgacaatgttgttaatctttgatgcattagaaaacggaactatatcacttgatgatgaagtgtcaacttccgagtatgcagcttctatgggaggatctcaagtattcctggaacctggagagatgcagacggtaggtacgctgctaaaatgcatttctgtcgcaagcgcaaacgatgcatgtgtaactatgagtgaatgtatctgcggtaatgaacaagaatttgtaaaacaaatgaatgagcgggcaaaaggacttggaatgaaacatacaaacttcgtaaactgtaacggattagatgcagatggtcatgagatgagtgccagagacattgcactcatgtcgcgggaactgatgaccagatatccgcagataaaggactactgtacggtctggatggaaaatatcacgcatacaactgcccgtggatcttcggaatttggcctgacgaatacaaataagctgatccggcagtacgaatatgccactggtctgaaaaccggatccaccggaaaggcaaagttctgtgtatcggcaacggcaagtaagaatggtgtggatctgatcgcagtaattatgggcgctgaggattcaaaaagccgttttaaggatgcggtaaccttattgaattatggatttgggaaatgtcagatttataaagcaaaagaacggaaactgccagtggttctggtgaaaggtggcaaagaagatcatctaaagattcaatatgaggaaggatttacttatgtagatacagaaggatctgatttatcgaaagtcgaagaaataacagaaattccagatgaagtaaaagcacctgtgaaaaaaggggaaacagttggccggatttgttatcggataagcgggaaagaaatcggatccgtaaatctgatcgcttcgacacctgtggaaaaggcagattttggagattatctaaaaaagatttggaagaaattattataacacttgtcgggaacatggaaaatgttttataataaagggtacgaatgcgggtagctcagaataattttcagtctgttttatgaaattttaccacccgcaatggatataaaaatacaggaggcagattaaattaatgattacagaacgtattgatcatacattattaagagcagatgcaacagaggaagatatccgtggattatgtgaggaagcagttacgtacggatttcattctgtttgtgtgaattcaagttgtgttgcgctttgtgcctctcttctgaaaaatacaggaattaaagtatgtaccgtgattggttttccgttaggagcaatgtcaacaactgcgaagattgcagaagcaacagcagcagtgaaagatggcgcagaagagctggatatggttatccatattggggcattgaagagtggaaactgggattatgtaagaagagatatcggtgcagttgtagctgctgccggggatgacgtgattgtaaaggtgattcttgagacatgtctgcttacagacgaagagattcaggaggcttgtcttgtaagccgtgatgcaggtgcagactatgtaaaaacttctaccggtttttcaactggcggagcaactgtagaagcagtttctcttatgaagcgtacggttggctctgacatgaaggtaaaggcatccggtggtattcatacactggaagatgcacggaagatgttttatgcaggtgcagaccgtattggatcaagttccggtgtggcgattgcagaagctgagatgtctgagatacatacgatatgagcatcttaggttttttcacagttctttttctgattgtgtgcacggttatattagcagaaatgtatcgggagcagcattctttttgtgtaacacattacgaagtacattcaccaaagataacctgcacagccgaaaaagactcagtgaacagaattatttttttaagtgatatgcacaaccatgtttatggtaagcagaacaataaattgttcgaagctataaaagcagagcagccggatctgattttaattggcggagatatgctggtggcaaaaaatgacgtgcgataccaagaggcactggattttgtcagtcgtctgccgcagctctgcccggtttattatgcgagtggaaatcatgaacagagaatcaaagagaatcaggaaaactattctttgtgttatgaagagtatcgtaaaaagttacaggcaaaaggggttcgttttctggaaaatgaaagttgcgatattctgttgggaaatcaacagattcatatcagcggattggaactcccactgattgtgaataaaaaattccgcaaggcggatgtcaccgctgaagatgtacgcagatgcctgggagaaaagcatactacaggaaatcaggaaaaacagcaggagacaacagagaatttcgcagacaacagttatcacattctgcttgcccacaatccatcctatatggaagcttataaggaatggggttccgatctgattttgtctggacatttacatggaggatgtgtacgcttgccgggaattggcggcgtgatcactccgcaggcatttctttttccaaaatattcaggagagatgaccgtggagggagaacagacgatcatcgtcagcaaagggcttggaacacatacatttaatgtgagactgttcaatccggcagaagtgattgcaatcaccctttgcagataaaaggagattattatgggaataccggtaaaactggaagtatttgaagggccgttggatctgctccttcatctgatcgagaagaataaagtagatatttacgatatccccattgtggagattacgaatcagtacatggaatatatccgtcagatgcaacgggaagatctgaatgtgatgagtgaatttcttgttatggcagcgacgttgttggatattaaatgcaagatgcttcttccaaaagaagtcaaagaagacggagaggaagaagatccaaggcaggaactggttgaacagctgctacagtataaaatgtataaatacatgtcttatgagctcagagaccgccaggtagatgcggatctgattttatataagaatccgacaattccggaagaagttctagaatatgtggagccagttgatcttgaccttttacttggggatctgacaatggtacagttaaagaaagtttttcaggaagttatgcgtcggcagacagataaagtggatccggtaagaagtaaatttggcaagattgagaaagaggaagtttcactcacagataagttcctttatgtgcgtgattatttacaagaacaccgccggttcagtttccgtcagcttcttcagaagcagaagagtaaaatgcatgttgttgttacgtttcttgcgattcttgaaatgatgaagctgggtgaaatttatgttgaacaagaatctacttgtggtgagatcatgatcgagagaaaaggagacgtagtgtaaatggcaggagtaaaaacacttcaggctgcaattgaagctattttatttacaatgggagagtctgttgaactaagtaaaattgcgaaagcaatcgaacaggatgagcagacaaccgaagaattacttcaggatctgatgaagaaatacgaatcaaagaacagaggaatccgcatcattgaactggacaagtcttatcagatgtgtacaaagaaggaaatgtatgactatctgatccgtgtggcaaagcagccaaagaaatatactctgacggacgttcttcttgagacaatgtcaatcattgcatacaaacagccgatcactaagatcgaggtagaaaagatccgtggagtaaagtctgatcatgcagtaaataaacttgtggaatatggtctggtagaagaagtcggaagacttgatgcacctggaagaccaattcttttcggcacgacggaagaattcttaagaagattcagtgtaccgtcgattgatgatcttccgtcattgaatccggagcagctggaacatttcaaagaagaagcagaggatgaggcaaagatccgtatggacatttgatttttgaattctacaacttgcattggaatcataaaattaaaagaagaatggagcttccaatataaacaggaaatcaattaatgatagaatttaaaaagtggtatttcagaatctatttattctttgttcgcatactgattgtcagcatgatcattggaatttcttttccggttcatgtttttggaactactgagctaaaacaattatacgccctgtctgccgtcttaatggatgcagacagtgggcgtattttattttccaaaaatggacaggaagaacgggcaatggcaagtacaacaaagattatgacctgcatccttgcattagagagcagcataatggattcagaaaatcagattgttacagtaagcgatcaggctgctgcacagccaaaggtacatcttggaatggttgcaggagaacggttctatttaaaagatcttctttattccttaatgctggagtcacataatgactctggggttgcaattgcagaagctgttgccggaagtgtagagaaattcgcagatctgatgaaccaaaaagcgcggacgatcggctgttattctacttattttatcacaccaaatggattagatgcagcagattcaaatggaatccatcacactacagcagaagatcttgcaaggatcatgcgttattgtattatgaattctaagaaacaggaagaatttcttacgatcacgcgtaccgaaacctatcagtttcaagatgttgaaggaaaacggtcgttcagctgttataatcataatgcattcttaaatatgatggacggcgctctttccggaaaaacaggatttacttcagatgccggatattgttatgtcggtgcgctgcgtagagatgagcggacatttattgttgcgctccttgcctgcggatggccaaataataagagttataaatggtccgatatgagaactcttatgacttatgctttagatcattatcaatataagacatttgaaattgaattacctgtccgacagatatttattaataatgggataaaagcacattcagatacgatagcttatcccggtaaaaacggaaccaagatttctcttactgcaaatctgacacctgtttctttcctattgaaagaagatgaaacgatttctgttgactatgagattcctgatcagttggatgctcctgtaaggaaaggaatgcaagtcggcaggattcgctgcacgttaaatgacaaattgatccgtgaatatcccgtctatacaacacagaatgcagaaaagagaaccttcaaaaaatgtgtggaatatattttccacctgttttctatacaaaattcgtaccaaaaagcaggaaatattaaaaaagatcaagcgaggtgattaaaatagtcactacaatctaagactttcctgtgctaatataaacgagtgttaaaaaacaacaactaaattgattaaatataagagaggtacacattatggaaaactggaggaaatacgaaaagacttactttatgccacctgagccatgttatgactgggtaaagaaagattcaattgacaaagcaccaatctggtgcagtgttgacttgagagatggtaaccaggcactgatcgagccgatgagtctggatgaaaagttggaattcttccagctgctcgtggatgtaggattcaagatgatcgaagttggattcccggctgcgtctgagacggaatatcagtttttaagaacattgatcgagcagaacatgattccggatgacgttacgatccaggttctgacacaggcaagagagcatattatcagaaaaacttttgacgctgtcaaaggtgctccacatgctattatccatgtatataattcaacatctgttgcacaaagagaacaggtatttaagaaagataaagagcaggtaaaacagattgcaattgacggtgcaaagcttttgaaagagttagcagaagaaacagatggaaactttacattccagtacagtccggaaagttttcagggaacagaagttgactatgccttggaagtctgcaacgcagttcttgagatctggcagccaacagctgacaacaaagcaatcatcaacctgcctacaacagtggaaaatgctatgcctcatgtattcgcaagtcaggtagagtattttaacaagcatctgcgcgacagagagaatgtaattctttctctgcatccgcacaatgacagaggatcaggggtttcagatgctgagcttggaatccttgccggtgctgataaaattgaaggaacattgttcggaaacggagagagaacaggtaacgtagatattatcacacttgcaatgaatatgttttctcagggtgtgaatccggaacttgatttctctaatatgagtgacatttgtgaaatctatgaacgcgtgacaagaatgaaagtttctccgcgccagccatatgcaggagatcttgtatttacagcattctccggttcacatcaggatgcgatcgcgaaaggtatgacctggagagaggagcatgactgtcagacatggactgttccatatctcccgatcgatccacaggatgttggcagaagatacgattccgatgtaattcgtattaacagccagtcaggaaagggtggcgtaaactatatcctgaagcagagctttggaatcagcttaccggaaaagatgagagaagaagtcggatatcttgtaaaagatgtttccgacaaggctcacgaagaacttacaccagacaatgtatatcatatctttgaagaccattacatcaatgcgaaaccaattttcagtgttgatgaattccactttaaacaagaagatggaattgtcgcagaagcaacgattcaccacaatggaagtaaccgcaagatcacaggtgttggaaacggacgtctggatgctgtcagcaatgcgatcaagcattattttgatatcgaatttgaacttgcattttacgaggaacattctttgacaaaaggatcttcttccagagctgttgcttatgtcggtgttatttccaacaagaagcgttactggggtgtcggagttgatgccgatattatcaaagcatctattgaagcactcgttgttgcagtgaataaattggatagcgtacagagatcccagacatgcaaggatgaaagattattagatattacaaattatatttacgcaaattataaagaagttacattggacgatcttgctgagaagttcttcctttcaaaaccatatttgtcaaaatatattaaagaaaaatcaggaatgacattcggagatattctgaaagaaatccgtatgaaaaaggcaagagcaatgcttaagagcagcagtgcaactgtagaaagtattgcagaatctgtgggatatcagaatgtagagcattttaacagaacatttaaaaaactgtataatatcacaccggtacaatatagaaacaaaccttgatcccgattcaagtttgactaaatttgaaaatgtaatcttaaaacaaatcgcctgacagttaccataaatagtacctgtcaggcgattactgttatgcagattcattattctgctaattcttcccacaattcatacaattcttctaatcttgcttcatttgcagcgcgttctgttgaaagtttctggcactcaatagagttcgaataaacttcctctttcgtcagttcctcgtcaatctctgtgttgcgatcttcaagttttgcgatttcttcttctgttttcttcaactcatttttacgtttacgttcacgtgcctgctgttccttctgttcctgccagcttaattttgaatccgaagcaggagtggatgcagcagaattgcctaaattggatacgttttctgcatttgtttcatttccagaagcataagcaagtgtcagtgcttcttttttctccagataataatcgtagtttccgatgtaattaacaaatgtctgattcaccagttcaaggatacgggaggcggtctgattgataaaataacggtcatgggagacataaagaatcgttccgctgtagttattcaatgcttcttccagaatttctttggaagtaatatccagatggttggtcggctcatcaaggattagaaaatttgcttccgaaagcataagtttagcaagcgatacgcgtcctttttctcctccgcttaaagtatgaatctctttgaacacttcatctccggtaaactggaatgccgcgagtgtatttctgatctgtgtattggtaagattcggataatcatcagaaatctcatcaaaaatcgtcttatcatcatgaagtacgtgatgttcctggtcataataaccgattgtcactttggatccaagtgtgaattcgccctgatccgctgcaataacctgattaatgatcttcaaaagtgttgtctttccggttccgttatcaccaatcacagcaacatgttctccacgtttgatctcaaagctgatatcatggaagagaacctgattatcaaattgttttgagagatgctctactgtgagaacatcatttccactgatctgtgatggttccagtgtgaaatgcatttctttcgtactgtcaaccggtttgtccaatggtgtgattctgtcaagcattttctcacggctctctgcacgcttaattgatttttcacgattgaaagactttaatttatcaataacagcctgctgatgtttgatctcacgctgctgattcatgtattctttcagctgtgcatctcggatctgctgttttttcattgcataatctttataatttccaaggtacatgcgaacttgtgcattgtcaatctcaacaacttttgtgacaacacgattcaggaaataacggtcatgggagacgataaataccgctccggaataattgatcagatatgtttccagccaggcaatggaattcagatccaagtggtttgtcggctcatcaagcaggaggatatccggacttgtaagcagtaattttccgagagaaacacgggtcttctgacctcctgaaagtgtatctgtctgtttattaaaatcgtcttccgtaaacccaagtccctttaatacacctgtaatctcactttcgcaggcataaccgtttcttgcatcaaattcagactgtagacgattgtaggtctccaggcggctctgcaattcctcaccttccagatgcttcagttcatgttcaatggaacgaatctgagcttccattgcaaaaatatccgcttttgcactttttacttcctcataaatggtatttccggattttaaatcctgacgctgcgcaagataaccgagtgtctttcctttcgcgagaataacctctccaccatcaagaggttcttctccgatgatcatcttaaggattgttgatttcccggcgccgttcacaccgacaagagcagctttctcacgatcttcaatatgaaaggagccgtctcgtacaatttcgcgttccccaaacgctttttctatattgtgacatgcgagtatcatatattttcacctcgttttttgacttctaacattatcattatatagaaaaatgtcgaaaatacaaggaaaatatatggattttaaaggtttttgcaaaacaaaagtttgacagaactttaactcttttatataataaagagtagtttaagagtggagggctaaaaattggaacagagaaagatatcacgtgcagtcatttccagacttccgaggtactacagatatctgggagatttgctggaggctggcgtagagagaatttcatccagtgacttgagtaagaagatgcatgtaacggcttcacagatacgtcaggatttgaataatttcggtggattcggccagcaggggtacggatacaatgtgaaatatctttatacagaaattggaaagatcttaggattggatagatgtcataattttattatcattggtgccggtaatttaggacaggcactagcaaactatgcttccttcgaaagaagcggatttattctgaaaagtcttttcgatgtgaatcctcgactggaaggcgtaacgatcagggggattcctgtgcgtatggttgatgaactggaagattttcttaagaataatgacattgaaattgctgcactgacacttccaaaatcaaaagcaattgaagtggctgatattctggtagataacggtgtgaagggaatctggaattttgcacatacagacctttcccttccaaaggatgtggtcgttgagaacgtacatttatctgacacactgatgaagttatcttacaacctttgtcagcaggataaagaatagaatctagcaaagctgcaaggatgctgtgggaccaactgacaaaaggaggtttcgcagcatctgttcatgttaaaaggaattaataatgttagaaaggtcaggcgataagcatgagatatcttccaaatgggaagcagatgagtgaagctgatgcacacacaattcatgaaattgggattccatcccttgtacttatggaacgtgcagcacttcagattgtcgagacaatgcataagaaaaatatttccacagaaaaaagtctgattgtttgtggaagcggcaacaatggtggagacggatttgcagtagcaaggctcttaaccgaacagggaaagcatgcagatgtactatttgcagggaaagaagcttctttaagtgaagaatgtcgatgtcagaaacagattgtagaaaatatggggatttctgtattcacagaattcccggatgaagaatatactgtaataattgatgctgtatttggtgttggactctgccgtgaaatcacaggacattataaagatgtgatcgactggatgaatcttcaggatgcagaaaaagttgctgttgatattccatccggaatctgtgctgcaacaggaaagattcttggaacagcatttcgagccgaccttacagtatgtatggcatgtgtaaaattaggctgtgagcttttccctggcaagtcctatgcaggagagagcattccggttgcgattggaattgatccgaaatatttttcgaatcgcctggatgtttgttatacctttgacaaaaatgatcttgaaaaacttcttccttcgagaatgatgaattcgcacaagggaagttatggaaaagttcttatgatcaccggaagtcccgggatggctggtgctgcatttctttctgcctgtgctgcctatacagttggtgccggtctagtacagatttatacagcaagtgaaaaccgtctggcactgcaggaacttcttccggaggcaatcatatcctgctatgattcttatgatgacagtcaactgtctcatcttcttgactgggctgatgtggtttgtattggctgtggacttggaatgggacagatttccgaaaagatattgaaaaatgtattgaaaaatgtatcttgtccatgtgtcatagatgccgatggacttaatttactgagcaggaatatagagttattaaatcaatgttgtgcacctgtgattttaactccacatatgaaagaaatgtcaaggctgaccggatggagtattgatacgatcatggaagatcgcttccaggcacttgatcagatcataaaacaatccggaccggatacaaaatcatccataatctgtgtgttaaaagacagtcgtactgttgtcgcacagacaaatcggcagagatttgtaaatctcgctggtaataactctatggcaaaaggtggttccggagacgttctcgccggaacgattgcaggacttcttgcacagcatatggcaccatttgaagccactactgtgggagttttcctacatgcctgtggtggagatgaagcgaaaaagagcaaaggaagttacagcgtattagccagagacctaattcagggcatggccgatgcaatgaagaatgcaaaggagtgcagataaattatgaaacagtataacagagtatgtgcccggatcaatctggacgcaattgcatataatatggaacagatgaaaaatcgcattggtcaggagggacgtttaatagctgttatcaagacggatgcatacggacacggagcagttcctcttgcggaaatgtttgaggaaacgccttatatctggggttacgctgtagcatgcatgggagaagcaagaactttaagagcacatggaatcaagaaaccaatcttgattcttggctgtgtttttcctgatgagtatgaagaaatggttgaaaaagaaatccgtgcagcagtttatacagaagagatggccaagggaatggctgatgctgccgtaaggtcaggaaagaccgcatttcttcacataaaaatcgatacaggaatgggacgaattggattcaaagtaagcaaagagagtgttgagacaatttccagaatcagcaaacttcctaatattaaaatggaaggaatgttcacacactttgcaaaggcagatgaatttgacaagtcttatacatttacccaacatgaaaaattcctctggatgaaagaacagttagaaaaaaatggagtccagatctcctattatgattgtgataacagtgccggaattattgattttccagatatgaagcatgatcttgccagagccggaatctctatttatggaatgtatccgtcagatgaagtgaaaaaagatgctgttgacctgaaaccggcactggaattaatcagccatatcagctttgtaaaggatgtggaaaaaggaacttccatcagttacggtggaactttcgtcgcgccaaagaagatgcggatcgctacgattcctgtcggatacggtgacggatatccgcgttccctttcaaataaaggctatgttcttatccatggaaaacgtgcagatattgtaggaagagtctgcatggatcagtttatggtagatgtaacagagattccggaagcaaaattcatggatccggttactttggtcggaaaagacaaggatgcaattatccgtgtagaagatctttctgatctgagtggaagattcaattacgaatttgtctgtgatctgagcaagcgtgttccgagagagtattataaaaacggtacgatcgtaaaacagattgattatttcgaataaccggaataattgaaagaatctggttgatatgcatacatccgataaaaccggagatactttagtatgttcttagaagaaaaacaaaaggttctgagaagaatcagagaacaaatacgaaaagtaactggaatatcggagtgtgaatgaattgataattaagcggggcgacatttattacgcagatcttagtcctgtcgttggttccgaacaaggtggaatccggccggtacttataatacagaataacataggcaacagacatagtccaaccatcatctgtgccgcaattacgtcgaagatgaataaggcaaaattgccgacacatattgaaatctgtacaaatgattataatattatgaaaaattcagtcattctgctggaacagatccgtacaattgacaagaaaagactgagagaatatgtctgtcatatcgatcaggaacgaatgaaaaaaattgaccaagcaataagaatcagtctggatcttactacataaatccaaccaaattctttacagaacaaaaaaagcgtggtaaaatcataaggatagtgctttacagaacttagtgtgtatctgtgaatgcaaatgaatttatataaaatacattgatacaatagaaaaggagaatcagaatatgtcaggacattctaaatttgcgaatatcaagcataagaaagaaaagaatgatgcagcgaaaggaaagatttttacaaagatcggacgtgaacttgcaattgctgttaaggaaggtggaagtgctgatccgacaaacaacagcagacttcgtgatgttattgcaaaagcaaaagcaaacaacatgccgaatgatacaatcgagagaaatatcaaaaaagctgccggagaaggaactgctgataactatgagcgtattacatatgaaggatatggaccgaacggaaccgctattatcgttaagactcttacagataacaagaaccgtacagcttccaatgtaagaaatgcatttacaaagggatgcggaaacgtaggaacacctggatgtgtatctttcatgttcgatgaaaaaggacagatcattattgataaagaagagtgcgatatggactctgatgatcttatgatgactgtacttgatgcaggtgctgaagactttaacgaagaagaagacagctacgaagtattaacagcaccggaagacttcagtgatgttcgtctgaagatggaagaagccggaatccctatggtttctgctgaagttacaatgattccacagacatatgttgatcttacaaaagaagaagatattaaaaacatccagaaaacacttgatcttcttgatgaagatgatgatgttcaggacgtataccataactggaacgaataatcagttataagaaatgggggacaatgatgagtaattacaagatggaaactaaatgtgtacagtccggttacaatccgggaaacggtgaaccacgtgtgctcccgatcatacaaagcacaacattccgttacaccagcagtgatcagatgggaagactttttgatcttgaagagtccggatatttttatacaagacttcagaatccgacgaatgatgcagtagcagcaaagatctgtgatatggagggtggagtagcagcaatgctgacttcttccggacaggcagcaaacttttatgcgattatgaatattgctgaagaaggtgatcatatcgtatgcgcatctgccttgtatggcggtacatacaatctgtttgctcacacaatccgtaaaatgggtgtgaaagcaactttcgtagacccagactgcacagaggaagaactgaatgcggcatttcaggagaatacgaaagctgtttttggagagacgattgccaatccggcattgactgtttttgattttgagaaatttgcaaaagctgcacatgcacatcatgttccgttaatcgtagataatacatttgcaacaccgattaactgtcgtccttttgaatggggtgcagatattgttactcattcaactacaaaatacatggatggacatgcagcctgtgttggcggtgcaatcgttgatagcggtaactttgactgggctgcttacggagacaagtttgccggacttacaacaccggatgagacttatcacggaattgtatacacagaaaagtttggtaaagctgcttatataacaaaagcaacatcacagctgatgagagatcttggatcgatccagtctccacagaatgcatttcttctgaaccttggactcgagagtcttcatttgagaatgccaagacattgtgagaacgctgtaaagatggctcagtatctccagggacatgagaaagtagcatgggttaactgtccgtcacttccgggaagtaaagattatgacctcgttcagaaatatatgccggatggaacatgcggtgttattacttttggattaaagggcggaagagaagcagcagttaagatgatggacaaactgaaactggttgcgattgtaactcatgtagcagacgcaagaagctgcgtacttcatcctgcaagtcatacacacagacagatgaatgagcaggaactgttggaagcaggtgtacagccagatctgattcgtttcagtcttggaattgagaatattgaagatctgattgccgatgtagaacaggcactggaagattaatataaataacatatgattcaggaggtatggattcccatgattttgtatccatatctcctgttttttgtatccgaattgtaggttttaaacagtaattagctcttttgcttaaattgtggagattgatatgcggaattggatacaatacatatttccccgtattctgtgcattctagtaatagtatttatttactttcaacaggaggcatatttatatgagcgaggaaaaaaagcaaaaatcagatgaaatcaaagaatttggtgcgttaatgttaaatgaaaataaaaagaattacaaaattcgtcttctgacaattataggtgaaattgaaggacatgaaacagtatcaaataataccaaagcaacaaagtacgaacatttacttccacaactggctgaagctgaagaaagcgatgaagtagagggggttcttattttattaaatacactgggtggagatgtggaagctggacttgcaattgcggaaatgatagcttctttgggaaaaccaaccgtttctcttgtccttggtggaagtcattctattggcggtcctcttgctgtttctgcagattattcctttattgtaccgacaggaaccatggttgttcatccggttcgttcaaacggtacttttatcggtgtgacacagagtctgagaaatatggaacgtacacaggacagaattgccagatttattgctgcacactctaaaatcacagaaaaacgtcttgttgatctgatgttgaaccctacgcagcttgtaaaagatgtaggaacactgttagaaggagaagaagctgtaagagaagggatcatcgacgaagtcggaggcattcaccaggcattaaaaaaactctatgaattgattgatgaaaaacgggaaaaaccttcggaaatgtaaatatagaacaaaaaaatggcatctgatcaaagaaattttgtaatgacatgaattttaattgatgttatacttgaaatagtatgtattcaatctatcgtttgattgaatcagtacaatggtataataattaagggggaatcagatggctgcaaaatctacaaacacgaaaaaaagttctacgaacaacacagcgaaagcagcaaaaaatgcaacaactaagaaaacatcgacagcaaaaaaagcttctgcctccacaaagaaaagttctggcagtaagacaaaaagaacttcaaatcatataaatacagcacaaagtcaggaaatccgttcagagatccttctattgggttcccttgccatctgcatccttcttatcctgagtaattttggtatgggtggcatagcgggaggagcaatttcttctgtaggatttggacttgtaggagcaatggcatatttatttccatttgtttttttcggagcagttgctttttatatttccaataaaggaaatcctcatgcttacataaaagtaggtgccgcaattgttctggtcattctcctttgtggaattttagaattgatgtttcatccatatactgccgggacatctgttttatcttactacaaagattccagtgctgataaaaatgcgggtggattacttggcggaattctaatcagtattttatgtccactgattggagaagcaggtacttatgttattttgatcattttctcaatcatttgtatcattctggtaacagaacgttctttattagctccacttggaagacatggaaagaaagcttaccaggaagtgaaacggaaacatcaggaaactgctgagatccgtacactggagcgggatgcccgcaaagaggcacttgcgttgaagcaaagagaaaaagccgaaactttacaggcagatgcatcttctccaagtgaaaaaaagaaacgcacaaagcggacagaccttaaagcatcaggtattacgttcgccacaacgcttctttcagaggaagaatcacctgttggtggctttgggcggactccaaaatcacctgaaatgacagaacttgtcccagagaaagagccggattcaaaagatctgacggattcctttgaagatcattttgtcattaacagagcagaaccggcaatggatgtacaagaagagattccatttgacgatgtactgcatcttgaaccggtacagacacccgcttcccgacaagaaaacgagatgagttctgaacatgatccggctgcagatcctataattgaaaatagcccggagataaaacaggagcattccagaaaaagcagcaaaaaagacgcgcaggcggttgccgcagagacagccagtgtagaacagaccatacgggaacaggagcaaaaaccacggccggtttatcatacacctccgctgaatctgttaaagaaggggaagaaaggcggcggtgattcggatgaacaccttcgtgccacggctttaaaactggaacagacactacagaattttggagttggagtacatgtaacaaacgcaagctgtggtccatctgttacaagatatgaacttcaaccggaacagggcgtaaaagtaagccggattgttggacttgcagatgatatcaagctaaatcttgcagttgcagatctgagaattgaagctccaatccctggtaaagccgcggtcggtatcgaagttccgaacagtgaaaatacagcggttatgctgggagatctgctggagtcaaaagagttcaaaaacagtaaatcgccaatttcatttgcagttggtaaagatattgccggaaaggttgttgtgactgacattgccaagatgccgcatcttcttgttgcaggtgcaacgggttccggtaaatctgtctgcatcaacactctgatcatgagtgttatttataaggcagatcctgatgatgttaaactgatccttgtcgatccaaaagttgtggaactaagtgtatataacggaattccacatctgatgattccggttgtcacagatatgaagaaggcggcaggtgctttgaactgggcagttactgagatggaaaagcgttacaaactttttgcacagtacaatgtacgtgatttaaagggctttaatgaaaaggtcaagcatggggaaaccggaccggagattcagaaaaagcttcctcagattgtgattattattgacgagcttgctgatcttatgatggttgctccgggagaagtagaaggtgctatctgtcgtctggcacagttggccagagcagcgggacttcatttgattcttgcaacacagagaccatctgtaaatgttattaccggattgatcaaagcaaacatgccttcccgaattgctttttctgtatcatcaggtgtcgattcaaggacaattatcgacatgaatggtgccgaaaagctcctgggaaagggagacatgctcttttatccatccggatatccaaaacctgtcagggtgcagggctccttcgtttcagacgaagaagttcaaaaagttgttgattatttgattgacaagaacggaaatacctcgtacagtaatgaactagaagaacagatttcgagcagcgcagatcttccggggcaggggatgcttccgggacaacaggacagcgagaacagcagggatgtctattttgcagatgcagggaatctgatcatcgacaaggaaaaagcatcgattggtatgcttcagaggatgttcaagattggtttcaaccgtgctgccagaattatggatcagctatgtgaagccggtgttgtaggtccggaggaaggaacaaaaccaagaaaagtgcttatgacaaaagaagaatttgcagaatatatgcagaatcagacttcgtaaaatctaaaaacaccaaaagtgatacaaaggagagggaaagatgaaaacagatattcagattgcacaggaagcagaaatgaaacacatcaaagaggtagcggtacaggccggtatttcagaagatgaacttgaattttatggaaaatataaggcaaaactttccgatgaactctggaacagaatcaaagataacgaggatggaaagcttgtacttgtaacagcaatcaatcctactccggccggagagggtaagactacaacatctgtaggtctcggacaggcatttgcaaaacttggaaaaaaagcaatgatcgcacttcgtgagccatctctcggaccatgtttcggaatcaaaggtggagcagccggtggcggatatgcccaggtcgttcctatggaagatctgaacctgcattttacaggagattttcatgcgatcacttcagcaaacaaccttcttgcagcaatgctcgataatcatatccagcagggaaatacacttggtattgatccaagacaggttgtatggaaacgttgtgtcgatatgaatgatcgtgttctcagaaatattgttgtcggacttggacgcaaaacagacggtatggtccgtgaagatcattttgtcattacagtggcatctgagatcatggcgatcctctgtcttgcagatgatcttgctgatcttaaacgcagacttggaagaatcattgttgcttacaatttcaagggagaacctgttacagcagatgatcttcaggcaacaggtgctatggctgcacttctgaaagatgcgatcaagccaaacctgatccagacacttgagcatacaccggcattagtacatggcggtccatttgcaaacattgcacatggctgcaatagtgtacgtgcaacaaagatggctctgaagttaagtgacatcactgtaacagaagccggatttggtgcagatcttggcgctgagaaattctttgatatcaaatgccgtatggcaggtctgaaaccagacgcagtagttttagttgcaacagtacgtgcattaaagtataacggtggcgttgcgaaggctgaccttgcagaagagaacctggatgcccttgcaaaaggtattgtaaatcttgagaaacatattgaaaatattcagaaatacggtgtacctgtaatcgttacactgaattcatttgtaacagatacggatgctgaaaatgcatttattgaaaaattctgtcgtgaacgcggatgcgaatttgctctctcagaagtgtgggagaaaggcggagaaggcggtgtagatcttgcgcagaaggttcttgagacacttgagacaaaggaaagtgatttccatacactttataatgatgagctttctctgaaagacaagatccgtacaatcgcacaggagatttacggcgcacatgatgttgtatatgaacctgcagctgagaaacagatcgccaagattgaatctatgggatttggttctttcccgatctgtatggcaaagaatcagtattctctttcagatgacgctacaaagcttggaagacctgaaaactttgatattcatatccgcgaggtatatgtaagtgcaggagccggttttgttgtcgcactgacgggcgctgttatgacaatgcctggacttccaaaagttcctgctgcaaacggaatcgacgttacagatgacggaaagatcaccggacttttctaaagttttttatgattggctgccggtcatagtattttttgaccggcaatgccaattgttttcatggagttagataattaattaaggagatacacatggcacagttgatagatggtaaattaatctctcagcagattaaagatgagttgaaagaagaagtcgcacagtttaaggcagaaggcattgatatttgccttgctgttattcaggtgggaagtgatccggcttcttctgtatatgtcagaaacaagaaaaaggcatgcgcctatatcggggtagaatccagatcatatgaacttccggaagagacttcggaagaagaactgattaagttagtagaagagttaaatgcggatgaaagcgtaaacggaattcttgtacagcttccggtaccggatcatattgatgaagataagatcatccgtacaatttcaccggataaggatgtggatggattccatcctgtaagtgttggaagactctggatcggagaaaaaggatttttatcctgtactccggccggaatcattcagcttttgaaaagatccaatatttcgattgaaggaaaagaatgtgtgatcattggacgaagcaatatcgtcggtaaaccaatggcagcccttttgcttcgtgaaaatggaactgtaaccgttgcacattcccgaacaaaagatcttaaagaagtagcaaaacgagcagatatcctgattgttgcaattggaaaagagcgttttatcacatctgaatatatcaaagagggagctgttgtcatcgatgtaggaatgcatcgtgatgaagcgaaccatctttgcggagatgttgattttgcggatgttgaacctcattcttctgcaatcacgccggtaccgggtggtgttggtccaatgacaattgcgatgctgatgaataattgtgttgaaacagttcgtaagtaggaggaacttgtaaatgaggtgtacacattgcggagcaaatataccagacgatcagttgatttgtcccgtatgcggtgctgaagtacagattgtaccagattataaccctctggaagacgtactcgcacgcgaagtgaaaggctcagtagccggagctacacgtcagatccaggcagatgtagtccgaagacagaatgtgagccaaaaccaacaaaacagaaatcggcaaaatcaacgatcgaatcctaattccacacgcgtcttaagccaggcggaactggataaagtaagagaagagcgaagagagcagctacggcgccagagagcgcaaagacaacgtcagaaaacagatgcaaagcgttatcaggatgcccgtcagtcaacagagaatctgcgccggacatctactgaaagcagacgcctgcagcagattaaaaaacaagaagctgccagaaaaaaacgccaaaaattacttacggtttttttcctgctcattcttctggttggtgtcggaatttatatcggatatcagaattcctatacaggcatgatcaaaaaagggaatgccgcactgcagaatagtaactatacttctgcagagaattattttaacagagcaattataaaggataaatcaaaggcagaggcttataccggacttgctaatatctatgttgcccaggaggatctggacagtgcagagagcgtctatctcaacgcactggagacacaaccgtcgaatgtaaatctctataaagctgcagtaaaattctatgagaaaacagaacagccgaataagatttctgatctcctgcaggattgtgaagataagaatgtattatctgctatgaatgattatgtttcatctgctcctgaattcagtttgaaagaaggaacctatgatgaagtacagcaggtaacattaacatctgctacaggcggaacgatttattatacaacagatggttctgatccgacggagtcaagtacagaatacaaagaagctgttttgcttcagtccgaaggtgacacagagatccgtgcaattgctgttaataaaaagggaataccaagtgctgtttccagtgcgaaatattccattgaatttccacttgtagacgctccggcagtttctccatcaaccggacaatatagtacagccactcagatcacgattacggtaccggatggatatacggcatactacacgatggacggttcaactccaaccacatcctctgagaaatatactgacccgattgatatgccagaaaattcacaaacaactttttcagcaattctcgtaaacgataaaaatggaaaagcaacggaagtaacaacacgaaactatattactacatattaagtaaactgtgtaaagtaactagaaagcaaccttgattttggaaaatattatgtaaattttccaaaatagggttgctttttttagcatacagagttataataatatctgttaaaaaaataacaatactacataaaaaaggagagatttgttatgagtagattttgcttaccaagagacatttatcatggaaaaggatgtctggaagaactgaagaacctgaaaggaaagaaagccattcttgtagttggtggcggttctatgaaacgtcagggattcctggataaagcagttaattatctgaaagaaggcggaatggaagttcagctgtttgaaggtgttgagccagatccgtcagttgagactgttatgaaaggtgcagaagcaatgcgtgctttcgagccggattggatcgttgctatgggtggtggatcaccaatcgatgcagcgaaagctatgtgggcattctatgagtacccggagatctcctttgaagacctgatcacaccattcagcttcccggaactgagacagaaagctaaatttgcagcaattcctacaacttcaggaacagctacagaggttacagcattttcagttatcacaaactatcagactggtgtgaaatatccactggctgacttcaacatcacaccggatgttgcaatcgttgatcctgaccttgttgcaggactcccggttaaacaggttgcatatacaggtatggatgctcttacacatgcaattgaagcatatgtatccacactgaacggacctttcacagatccacttgcactgcaggcaattgagatggttcttgattatctgccaggatcttacaaatgtgatatggttgcaagagagcagatgcattatgcacagtgccttgcaggaatggcattctctaatgcattacttggtatcgttcattcaatggctcataaaacaggtgctgcattctctacaggacatattccgcacggatgtgctaacgcaatttaccttccatacgttatcaaatacaacgccaaagacgctgtagctgcaaaacgttatgctgaaatcgcacgcagaatgggacttgccggaacatctgagcaggctctgatcaacagccttgttgagaagattgatgagttcaatgtaagactgaacattcctaagactctgaaagacttcggaatcaatgaagaagaattcaaagaaaaagttgacaagattgcagaactggctgtaggagatgcctgtacaggatctaacccacgtgcaatcgatccggctgctatggctaaacttcttacatgtacatactacggaacagaagttgatttctaaaatcaaaaattaataaaggtttcagtgttcttataaaataagataacgctgtaaacttgtcttaaacaatacgggtagatgcatgaaattgtgtgtctgcccgtatgttttacttgaattcatagctgaagtgtcgtattattaacaaagagcgagttgttattgtttacacaatatttgaagacaataacgtcgatttatttacaaggaggagaaacatgtataagatattaaaagctgaaaaactggctgataagatttatctgatgaatgttcatgcaccacgtgtagcaagtcactgtcagcctggtcagtttgtcatcgttaaaatggacgagaaaggcgaacgtattccgctgacaatctgtgattatgacagagaagcaggaacaatcacaatcgttttccaggaagttggagcttctacagtgaaaatgggagaactcaaagccggagacagtttccgtgactttacaggtccgcttggatgcgcttctgagtttgttcacgaagaccttgagtcccttaagaataagaagatgctgtttgtagccggtggagttggggctgctccggtttacccacaggtaaaatggttgaaagcacacggaatcgatgctgatgttatcgttggtgctaagacaaaagatatgctgatccttgaagatcagatggaagctgttgcaggcaactactacccatgtacagatgacggttcttacggacacgcaggaatggttacaactatggtagaagaacttgtaaacaacggaaataaatacgatgtctgcgttgcaatcggaccgatgatcatgatgaaattcgtctgtctcttaacaaagaaacttgagattccgacaatcgtcagcatgaacccgatcatggtagacggaacaggtatgtgtggtgcctgccgtcttcaggttggtgatgagatcaaatttgcatgcgttgacggaccagagttcgacggacaccttgttgactttgatcaggcaatgaagagaagccagatgtacaaatctgaagaaggacgcgcaatgctgaagcttcaggaaggcgatacacatcacggcggatgcggacattgtggaggtgacgaataatggctgatatgatgaaaaaagtacctgtaagagagcaggatccaaaagtacgtgcaacaaactttgaagaagtttgtctcggttataacaaagaagaagcaatggaagaggctacaagatgccttaactgtaagaatgcaaaatgtatccagggctgtcctgtatccatcaacattccggcatttatccagcaggtaaaagaaggaaatatcgaagaagcttacaagatcattggtaaatccagtgcacttccggctatctgtggacgtgtttgcccgcaggaatcccagtgtgaaggaaaatgtatccgtggaatcaaaggtgagcctgtttctatcggaaaactggagcgtttcgttgctgactatgcacttgagaacgatatcaaaccagaaggtgctgagactatgaacggtcacaaagtagccgttatcggttctggtccgtccggacttacatgtgccggagaccttgcaaaactcggatacgatgtaacagtattcgaagcattacatgagctcggtggagtacttgtatatggtattcctgagttccgtcttccaaaacagaaagtcgttgcaaaagagatcgagaaagtaaaagagctcggtgttaaattcgagacaaacgttgttattggtaaatccacaacaatcgatcagctgatggaagaagaaggattcgaggcagtattcatcggatccggtgccggacttccaatgttcatgggaattccgggagagaatgcaaacgaagtattctccgcaaatgaatacctgacaagaagtaacctgatgaaagctttccgtgatgattacgatacaccgatcgctgccggtaagaaagtagccgttgttggtggtggtaacgtagctatggatgctgcaagaacagctcttcgtctcggcgcagaagttcatgtagtatacagaagaagtgaagcagagcttcctgcaagagcagaagaagttcatcatgcaaaagaagaaggaatcatcttcgatcttcttactaatccgaagaagatcaacgttgacgagaacggtaatatcacaagcatgacagtgatcaagatggaacttggcgaaccagatgcatccggaagaagacgtccggttgagattgagggctctgagtacgacatcgaagtagatacagttatcatgtctcttggtacatcaccgaacccgctgatctcttctacaacaaaaggtcttgagacaaaccgcagaaaatgtatcgttgcggaagaagagaacggacagacatctaaagaaggcgtatttgccggtggagatgctgttacaggagctgctacagttatccttgctatgggagctggtaaagcaggtgccaaaggtatcgatgaatatctgagaaataaataattgaaggaagattgtacataggatcgtaagcttctttgagaaaatcggaatttaaaaaatatcctgacaagatgcagaaaaatctgtgcttgtcaggatattttttaaataactggaaatttcaaggtaatagagtaagtatcggattcaatatttacctgacaaagtccatgcatctgatgcatcatcgcatgtatatttttgacaccaatgcctgtcccgtgtacaaattgatcaggaacagcgatcgtattttggatggtaatacaggcagatgtcttagtgtattcagaaatcagaaaaaccggcagatcaggatgggcatattttttaatattagaaacaagattatcaataatccgtccagcaaaatctgtgcatatttgtatctgtaccggttcccagtggagtttttctatagaaacatgatatccgtccatttccagcaatccacatagttcggaaaggtattctcctaatgcatattctacattttccggctcctctaatttcataggattctctgagttgattagaaaaaaatcaaagagctggttagataaatcacgtatctgtgttgtcttggcataagctttactaatgtagtctgtgcattcattcaaagaattttgctttctggcaatttctaaaaatgtcataagaccagttaaaggtgttcttaagtcatgagccatactaagtacaagctggtcctgggcagatttcatttgagcttcctttagttgcttttcaatcaaggaaagacgcatttcgtttaagccatgtgcaagagtggccaattcatcatttccctttataggaatttcgcagtctaatgcacccgattcaatttgtgttacactagaacttagctgttgaatataattcaccttttttccgattccaatagcgaaaagtaagatccataggaaaatactgataaatgcggcagctatatagtataacagataatatttcaattcataattcgcataaatgtaaacgtctgcatctccatcagaaaaagataccgtatgaaaatattgccagttgtaatgtaaagtatccgattcagaagtatttcccagaacgatagagtttgaataggtactttcatagattaatacccgttcgcgggaaatagtaaaatgccgaattcccttttgatgagcccaatcgccaagttggtcggtatctgttgcagcaagctttttcttatgaacaaattctgtgagctcattaatgtacgatgtttctgaattatagatgaaatttgaactggcaaaatattcacttagcaaagttgttcctacctgaaaaaggatcaaaaagagaataaaagctgctgcaaaaccagataaaactaagaaaatgatttctttcgtaagactgttgcgttttaatttagccaagacgatacccctttccccaaacagtttgaataattttaggcttttgaggattttcttcaatttttgtccgaagatttcttatatgcaccataatagtattagccgaagtacttataaaaggttcttcccaaatactttcatagagattttgaagagaaaatattttagtggggtactgtattaataaaagcaatattttgtactctatttcagttaattgaatttcattcccttgttggaacacaatgttttttgaagaattgatgcatatctgatggatttcaatccactcttctttctgaatttgcaatatttctcgatcataaacctgatgacggcgcagaagcgatctgactcttgcgaaaagttcagtataagagaatggttttataagataatcatctgctcctgccataaatccaattaatttgtcggattcttttgatttggcagttaaaaaaagaatcggaacataagaaatttttctgatttcttcacaagtcttcaatcctgagatgccaggcatcatgatatcgagaatgactagatttgtgtgcgaagtgagttttttcagtccatctgcaccgtttgaagcttcttcaacggaataaccttctccttccaataaaatttttactccttctcgaatatctttgtcgtcttcaatgattaatatatttttttccatgaatgtctcctaatatttattattgtaaaaaatttaagataaaagcattgaactatactgtctgctgattagttactacccaaaacatactatgaaaagtagtgcagagcgctctatattttatgcattttataaattagtaggcttatttataataccataacaatgaataggagagaatagacttaagaattcttcagatttcttaagatgaaacttaaggaatttttgataaattaaagaagaattaattggttcaccgggaaattcagttagttacattggaagattatgtgatgaaggagagcgaaaataatgaagatatctatactcaagtgggtgaaattttggttgggacattaaatatgaaaagagcaatgcaagaaattattagaattttattaatattaactattcaaattctgattggcgttcttttatcttgtttaatagatgaaaaatggaattttaaaaacctattttggaattatggttttataatattttggagtagttatattgttgttagtataagcattagaattgcaaaaaaaaataggaaatagaataacgaggaaggtaagaatatgataaatttgatttacacagtcataaatattgcattaattatagttattgtagctcttattatttattttataagaaagaaaaatagataaatattgtaaaggacaaaaaactctatagatattttgaatgtattagcttttcgacccgaaagctaaactgttacgttactgttacccattttatcagcaattttgctcaaattagatgacaacctattcgaagatatggtaaaataataagccaaatgtttgcaataaacctaagaagcaaaaatctattttgagggaaatataaaacatatgacgaattataagagcaatgacaacagatttgatggaagatgtttccttgaagacattgagataaagttagaaaaacgactggaagaaatcaggcagtctctctctgatggacagaaagagattgataacatgcaggaatattactgggaaaactatacggagatggatgagtatggttacgaagattatgataatcagcaggcacttctgcatcaggtcaacgctaataatgagaagctgcaattaaaacatagatttgagaaaatgttagatgcaccttttttcggacgtgtcgattttatgtatgatggagatgacgaaccggaaccgttttatattggaatcggaaattttgctgaaaagaacggtatgcagccgctgatctacgactggagagctccggtcagcagtttgttttatgattatgataaaggaccggcaagctatgaggctcctgccggaagactggatggagagattctttcaaaatggcagtttaagattcagaatggagaacttgtctatgcctttgaaagtgatacaaaaatcgatgatgatattctgaaaaaagaacttggaacaaacagtgatgtgaaattaaaaaatatcgtccgcacgatccagaaagaacagaatgcaattatccgaaacacaaaagatcgaatccttgtaatccagggagctgccggaagtggaaaaacttcgattgctttacaccgaattgcatatctcttatatcatgaacgtgacagtttaaagtcttctaatgtgctgattctttcaccgaacggtgttttcgctgattatatttcacacattttaccggaacttggagaagaaaatatccgcgaaatgagttttgatctctatgcttataaagaacttcggaaaggtgtttctgctgattgcgaagacagatatgatcaattagaacgcagaatgagatttccagatcaagaatcacaggatcgttttgactggaaacaagcaaaagctttcattggtgagatcgaaggatttcttgcagttttagaagaccgtctgattgagtttaaggaagtctatttccgcgggatgacattgacggaagaagaaatgattgaactgttttatttcaaatttacagagactcctcttttaaatcgtatggatgccataaaagattatttcattgattcctgggaaactttaaacggaagaaatatttcagatgatgatcaagaaacacttcagatgaaattcgataagatgtacaaaacaaaagacatttatgccatctataattggatgttagaagactgcggatgtaatttgctgccagacgtcccttatgagaaaagaaaattaccatatgaagatgtatttcctatgctgtatctgaaatatcgcctgtcaggtggcaattctactcataagaatatcaaacatttagtaatcgacgagatgcaggattattcttatctgcaatatacaattttagaaatgctattccactgcagaatgacaattcttggagaccgtgcacagaccctggatacaaagcaacaggatgtattgagatttcttcccaaattacttggacgtgagatccgaacgattgagatcaaaaagagttaccggaacacattggaaattgcccggtatgcggaaaaagtcagtggagtatctgatcttgagttactggaccgccatggaaaagaagtcgtagaaaagacatttaacacagatacggaattgcttgatgaacttgtctgtcatttaaaatgtccgggagactttgaaactgctgccctgatcacaacaacagaagaggaagcttttgacttaagccgtctcctgaaactgcgtggtatcaacgtatcctatgtggatcgtaacagttccgcatttaagaaaggcctcacagtaacgacattttatcttgcaaaagggctggaatttgaccaggtgttcgcacttcgcggtgcaaaagaaaatccgcttaaaaatcaggcggaatacatttgcgcaacaagagctcttcacgaactctatgtttacgaaattgctgacagattatcaaaataacagttaacaggcatgcatgattaaaatttattcagaaagaacagaaaaatgaagattacattaataaccgtaggaaagataaaagaaaaatatctgcgagatgcaattgcagaatacagcaagcgattgagccgatactgcaaactggagattatagaagtagctgatgaaaagacacctgaccatgcaagtgatgtcgtggaaaatacaattcgcgataaagaagctgagcgcattatgaaatatgtaaaagaagatgcctatgtgatcactcttgagattaacggaaaacttcttagttccgaggaactttctgcaaaaatcaatcaacttggaattcaggggacaagccatatcacatttatcattggcggatccattggtttgggcaaagaagtgctcgcaagatcgaactatgcattaagcttttccaagatgacctttccacaccagttgatgcgggttattctgttagagcagatatacagaagttatcggatcatcaacggtgaaccttatcataaatagagatttgtcacagaaaacaactggtataggacatcgtgatatattcatatactgatgacaaaggatttttatataaaaaacttcaatgaaccgagagcagatcaaagaaaagatggtatccgcaatggatctcccaaaagatgtgattcagaatgcttctgttataaccattttaggacgaaatgaattatgcattgaaaattatcggggcattattgaatacacagatacactgatccgtgtgcagacgcgggcaggacagatccggatccagggaaaacgactccggattcaatactacacaaatgatgagatgaaagtaactggagcattatcatctttagaatttaccgaggggaggaatccggggtgattcattgcctgatccgctacttgtccggttatgtgaagattcagatcaaaggatactccccagaacgatttctgaatctctgctgttatcaccgcatccgattctggggattgacccgtatcggaacaaattatgaattatacttgagtttatctgattttcgaaagattcgtccttatgtcagaaaaacacatacaaaagtcatactaaaaaaacggtatggctttcctttttttctttctcgctaccgaaaaagaaaactattctttatcagcatcttcctatgcatttttctaatcgattgttactcgcaatttctatgggatattcattttcagggaaataaaagatggaccgacacgaccttgacaacgtttctgaaagaagaggggatttatcctggaatgcaaaagaaaaatgtagattgtcaggggattgtcaaagcccttcgaaaggaatataatgatatcgtttgggtatctgcttctcttgatggtagccggttaaaaatacagataaaagaaaatgaagatgcgcttcctatcatctcatctactcagacagattctttacctgctgatcttattgcttctactgatggaatcattacaaatttaattacacgcaccggcattccccaggtacatatcggggattctgtaacgaaaggaactttacttgtatctggacggattgacatcctggatgacagtggtgaaattaccggatatcaatatacgcatgccgatgcagatattttcgctgatacacagatttcttatctggatataatttcctgttatcataataaaaaagtatatacaaaagaaactaaaaagtccggatttattcaaatcggatctgtccggttagaaacatggaaaccaaaaatatctgacacttctgaaaaactttgtatagagcatcagttaaaactgggagaaaatttttcacttcctgttttttatgggcatgaaacaataaaaaaatacggcttcaagaaaataaaatatacaaaaaaagagatacagacaattttaagccgtcgatttcgttatttttgtaaagatttagaggaaaagggtattcaaattaataaaaaaaatgttaagatatatatatctgccgaaaaggcaacggcttcaggtacgctctatctgaatcagcagattgaagaggaaacagagaccgaaagaataactttagaaaggaacgaaccggatgagtctgtcggaactgatcattgatattccggctgaatacgagatgaatgtatttggccagtttgatacttatataaagaaaatagaaagaacttttcatgtcacattgatttcacgtgacggtgcaactaagattgtaggagatacaattgctgcacagaaagcccagcgtgtacttacacagcttgtggaacttgctaaacgaggaaatacgattacagaacagaatgtagactatgcaatctcgctcgtatttgaagatcaggaagaagcccttgtttctattgataaagatctgatctgtcatacactacagggaaaaccaatcaaacctaaaacattaggtcagaaaaaatatgttgatgcaattcgaaatggaatgatcactttcggtctcggacctgccggaacaggaaaaacctatcttgcgatggcaatggcaatcacagcattcaagcgcgaagaagtaagcagaatcatcctgacacgcccggcaattgaagccggagagaagcttggatttcttccgggtgacctgcaaagcaagattgatccgtatttaagacctttatatgacgcgctttatcagatcatgggagctgacagttttcttaagaattctgaaaaaggattgattgaggttgctcctctggcatatatgcgcggacgtactttagataatgcgttcatcatccttgatgaagcacagaatacaacgccggcccagatgaaaatgttcttaacaagaattggttttggatccaaagttgtcattacaggtgattctacgcagaaagatcttccatccggaacaatatccggacttgatgttgctgtaaaggttgtaaaagatctggaagggatcaacatctgtacgctgacaagcaaagatgttgtaagacatccattagttcagaaaattgtaaaagcatatgaggactatgagaagaaatcgtccagaccgagagaaaacaggaggaaaaaaggatgagtctttttatcgaagaagaggggaatataaagttagactttgatacagaagagattgccacattagttattgacgctgcattagaacttgcagactgtccttatgaagcagagatcaatcttcttttgactgagaatgcccagattcacgaaatgaatctggaacaacgtggaattgaccgcccaacggatgtactttctttccctatgatcgaatacgaagagccgggagatttttccgtgattgatgaagaaagtgcagaagcttttaatccggaatccggagaattgatgcttggtgatatcgttatctcaaaggaaaaagtgttatcccaggctgaagaatatggacatttacccaaaagagagtatgctttcctgattgcacacagtatgcttcacttatttggatacgatcacatggttgatgaagaacgtgttgtcatggaagcgaaacagaaagaaatcatggaaaaagtcggtattttccgctgatggaatacatatattaaatagattttaaggaatgggacactaggaggaagttatgtctgaaactgaggcacaaacaacgaaaaaacgaacgaaaaaggatgattatattgtccagggttcgatacttgcagcagcagctgtacttacaaaaatcataggcgtagtctacaggattccgctgacgaatattttaggagatgaaggaaacggattttatggatatgcctatcaggtctatgcaatcgctctgatgatttcatcattcagccttccgactgccgtatccaagctggtatcgatccgacttgcaaagcgtcagagacgaaatgcattccgtgtatttatctgttctcttgcttttgcaatcggtgttggattattcatctcgctgacaatctttttgggagcaggactgatttcaacacatttaatgaaatctccacttagcgtttatgcactgcgggttcttgccccgggacttctgatcgttgcagttatggctgttatccgtggatatttccagggaatgggaacaatgcttccaacagctatctcacagatcattgagcaggtatttaatgccgtgatcagtattgtcggcgcaagtgtcctctttggcatcggaacaaaagcaggagaaaaatccggagaggagcttctcggacctgcttacggtgctgccggaagtacacttggaacggttgtcggctctttatctggattgctatttcttttgtttgtcatttttttatataaaaatgtaatacgcaaacagcttaaaagagaccgcacccagaatgttgaaagttattctttccttctgaaagcattacttttaacagcaatcccagttgtattcagtaccgctgtatataatattaaccagattatcgaccttacaatctttaatcatgttatggagtcacaaggctatgtagagaaagaatatatggctcttcagggtatttacaccggtaaatacgacaccctgatcaatgtcccgatggcaattgcgaacgcacttggaacatctcttgtgccaagtcttacagctgttgttacagcaggtacaaagaaacaggttcacagtaagattaaccagacattacgtcttacaatggtaattgctattcctagttgtatcggttattttgtacttgcttccccaattatggttctgctgtacaatgactccagtgcaacaccagcgcgtctattgatggcaggagctatcgttgttgtactgtatggactttcctctgtaacgaattccattcttcatggattaaactacatgacaagtcctgcaaagaatgctgcagcagctcttggaatccatctggtagcatttgtactgatgatgactgtcttcaagatgaacgtctatgcgctggtgggtggaaatattgtatttgcacttgcaatgagtattttgaacctgctcaagattcgaaaagtcagcggtttcaaaatcgattttgtaagcaccttcggaaaaccattcgctgcagcagcagtgatgggcattgtaactttcggcgtattcagactgtttgatacactgatcggcggtcgtgtaattccagtatgcatttcactgattgtagcaatacttgtttatgcagttgttatgttgaagatcggaacactttctgaagatgatatccttgatcttccaatggggggacgtatcctgagaatttctaagaaattccatctgcttccagccgtaaaagtagaagaataaaaaaaataaaaaagccaatactgtatgaaaaaaggagcgatttgcgatgaaaaaatacatgattggctttttttctgttttatttctgattaccggatgtttgattgcaggttatcaggttagttacaacaatctactgaaaaaggaaaaagctatagaactgactaaaaatgaaaaaaatgattccattcaaaccagacgcagttcagcaaaaggagagtctgtttcagatgatgcatattatctgaaagagctgcatggatatgttgcggtctatctgcaagatggaacaaccctttacgaaacaaccagtctgtccgtaaacaatctgccggatgaagtacaacaggatttgaaaaatgggatctatcttaagtcagcggaagaactgtatggttttcttgagaattattccagttaaaaaagtggacgaagtgcacagaatcgtgtataatacagagtcagcggaaagaatatcggttactgttcactcccgtgtcaatcagcggagtgattgacgcgggagtgaacagtaacgaatatcgcaacattgaacggaacaggaaaaggagagatagacaatggaacaaaagaagattgatcgtatcaatgaattatataaaaaatcaaaagcggaaggactcactccggaagaagcgaaagaacagaagattcttcgtaaagaatatatggaacttatccgagtgaacttaagaagccagctgaacaatattgacatggaacaaaaagatggaagtattgttaatcttggtgaaaagtatggcgaaaaatatatgaacaagaaaggaaattagggtcatgttacagaatttaccacaggatccggtcatccttttgagtgttgtgaatacaaagctcagagatttttatccatcactggatcagttatgtaaagagatggaagtgaataaagaagaacttacagataaattagatctgattgactatgcttatgatgcatcctgcaatcagtttgtataaaggaaatgagaatgaaagagataattgaaaatgtaaaactggtggagaatgctccgttggaagagcctgcacgccagtattattttatggagaaagcaaaagaatatgttgctgaaatgtctgagaaactggggcgtccattaactgcgtgtgtgacgacatttggttgtcagatgaattcgagggactctgaaaaactgcttggtattttagagaaggtcgggtatgcagaagaaacggatgaagagaaagcggattttgtaatctacaatacctgtactgttcgtgaaaacgcaaaccttcgtgtttatggacgtcttggacaacttggttccattaagaaaaagaatccacataagatgatcgcactttgcggatgcatgatgcaggaaccggaagttgttgagaaactaaaaaagagctaccgctttgttgaccttattttcggcacacacaacatttacaaatttgcagaacttttaacatctgcaatacagtctgacagaacagtcattgatatctggaaagatacagacaagattgtagaagatcttccggttgaaagaaaatatccattcaaatccggtgtaaatatcatgtttggatgcaacaacttctgtagttactgtatcgtaccatatgtgcgtggacgtgaaagaagccgtgaaccgaaggcaatcatccgtgagattgaacgtcttgttgcagatggtgttgtagaagtcatgctgcttggacagaatgtcaattcttatggaaagaaccttgaagaaccgatgacatttgcacagcttcttcaggagattgaaaaaattgaaggacttgaaagaatccgtttcatgacttcacatccgaaggatctgtcagatgaattgattgaagttatgagcaagtctaaaaagatttgtaagcatctgcatcttccggttcagtcaggaagcagccggattctgaagctcatgaatcgtcattatgacaaggaacagtatcttgcacttgctgaaaagattcgtaaagcagttccggatctttcacttactacagacattattgttggtttcccgggagagacagaagaggacttccaggagactcttgatgttgtaagaaaagtccgctatgacagtgcctttacttttatttattcaaaacgtaccggaacacctgctgccgtgatggaagatcagattccggaagatgttgtaaaggatcgtttcaatcgtcttttacatgaagttcagacaatttctgcagaacagtgtgcaattcatgaaggaaccgtgcagaccgttcttgtagagtgtgtcaatgaacatgatcatcatctgatgacaggacgtatgagcaataacctgctcgtccatttccctggggatgaaagcctgatcggtcagctggttgacgttcatcttgatgaatgcaaaggattttactatatgggaaggatagagagtaactaaatatggggattgttgtaattgggacagtttttatcgatatcaaaggatattccatctcgccgtatattcctgccggaagaaatgtaaacaagaaggagttccattcgaagaaagagttcttatgaattatgatcatccggattctctggaaacagatcttctggtagaacatttaaaagaattaaaagccggaagagcaattgattgtccgctatatgactatagtcttcataatcgttctgatgaagtgattcgaatcgaaccaaaacctgtaattctcgtagaaggaattcttcttttagctgatgaacggattcgtgatcttctagatatcaaaatctacgtagaggctgacgcagatgaacgaattctccgcagaatatcccgagatgtggaagagcgcggaagagatcttaacggtatcattaaacaatacctgacaactgtaaaaccaatgcattatctgtatgtagaaccaacacgttccaaggcagacatcgtgatcaacagtggaaaaaatgatgtagcattcgatctatttgtatcgaaaatcgaacagctgttggatgaaatgaatcaataattaagtaagaaaaaatgcatgagtatgaaactaaaaatcatacacatgtattttttcgtttatttatcatataacaagtgaaaagcaaacttgttcatgttataattgattcaaagaaaaatggtaaaaatactttgccaaacttgataaaatagcgaacaataaggcagtacactagcaggagggcagaaaaatgtttaaaacaaaatgtaaaaaaacagtttcaaaaatgatcctatcattcatactgattacggtaactctattgtccggctgtcaaaagaatagcacccattctgctattgagtttggaactatagatgtgtctgaaattgataaaatcgaactttctggcacaacaggtgggaaagatggaaatttttcctatacattgtctgatcaggaaaagaaggagttcgtccatttgctaaatcaagttgagcttggtgatgaagttgataaaaatcaagcattatcaagtggagcagttacttactataagctttatttccaaggaaaagacatcgttacactctgtccgggacattatttcggtgttgatgaaaagtattatgagtttgttaattttgatgaattgtgggatgaatttgtcactttcaatagtaaacaagatacctctgagaaattaacggtctatgacggagctgtagcagatttaaattcaagtcaggaaaaagaacaagtatattttgatgcaactgttcttgaagtaaagaaaaaatcaattaaggtaaaatgttcagaatcctttgatagtggtattcctgttgatgaagaattctctgtaacaacgaatagagtagaaagtggtgagctccctgatttgaatgccggtgaccatattcgtattgcatttgatggcatcatcaaggaaagttatcctctgcaacttggaaatgtctttgctatatatcttctagatgaaaacggaaacttgtgaagtccgtagtctgaaaggctcctgcaggagcctttcgtttttttatgtcccaaaccaatatattttatggccataatatgaatgcgtgttcgaagtatgttatactgatactgattatgtgaggcgaggtgaattcaacttatgataaaaattgcaatcgttgacgatgaagaacagacaagagaactaattctccggactctaaaggaaaatatacaggaacaatacgaagtagagattaaactatatgcatcaggtgaaagtttctttgaggaaattcaaaagggcgaatcaacagatattttatttacagacattcagatgcaacagctggatggagtggaactggggaaattggtccgaaggctttgccctgacatgtacattgtcttcatcacatcttatgaagaatatgcggcagaaagttatcggatcgaagcatatcagtatattttgaaacaggatctagaatttcgtcttcccggagttgctgaacagcttattgaaaagctgcaaaaacaaaagaaagaattctgtattataaaagacggtacagaacaggtgaaattgctttataaggatattctttatctgtataaatccaaaggtgctaagtatgtaaattatgttactacccaaggcgttgtgagagagcgaacttctttggaaaatgcactgaaaatgttaaatagtagacaatttcttctggtggaacgtggatacgctgttaatataaagcagatttgcagagtaagcggtgacactatctatctcgaaaaaggatatgaagtaccggtaagtaaggcaagacttgcagaagtaaagcgagaaatcaatctctactggaggaattcgtaacgatggatacacttggaatatgtattggactgaattttcttgaaaccttccttttctattatctgttattcggaacagttatagacagaaagactctgaaaacgaaagataaatggattctctattttgttttaatcgtcacttcaacaattatttctgtatgggtcaaaagatctgtgtttagtgcttatggatacctgttgacgattttaattttggttttgggaagtttccttgcctatcgaaagcaactgattcttcttacagggatcgcatctatgtatgaagcagcaatgatgttatttttatatatcatttactaccttctcgcatttatttacgggaatcaggcagaaaaccctcagattttatttttccgttaccatgaaaatgaagtattttgtgtgatacaaagcctgttattaattatttccttttttatcattttcaaaataagaagctggaagaagaaaaaagacatagaagcctttcaatgggtatttgttttatgtggtgtactgttatcagcactcgttttggagtatcagaaacttttaaagtatggactactgtactccacagccggaattccggtgattcaggatgtcttaaaaggaagtctcatcagttttcttactatgatcgtgcttgtcatcgtcatgacatttcttatatggaaaaacagaaacataacgggacaaaatacatttcttctgatgaaagaagagatggagaagcaaaagtatgaggaaataagagcttccatcgagcagaacaaagaacttgttcatgatacaaagaatcattatcttgtgatcagtgaatatgtgaaaaatcaggaatatgaaaaactggaaaattatgtagatgaaatcagaagaaattttgtaaaaatcaatccacagatttatacaggaaatcatgtagtggatctgattcttgggcaaaagcgaatcctggcagtacaaaaagggattgatttccaattggatgtaacaccactatccagtctgacgatggaagaaagagagatctgttcactctttgggaatctgttagacaatgccctggaagcctgtgagaaagtgactgataaagaacgtaagaaaatcagtataaagattgagcagcatatgcagatgttgtttcttgaaattaagaatggaaccgataagcttcctgccaaatcaggacatacttttctgacttcgaagcaggataaatctcttcatggatatggcttgaaaagtgtggaacggattgtcacacgatatgatggagatctggcctatgaaatggaagatggaatgtttgttgtttcaataacattttttgatttataaatactcatgtccagtaatccagtacttgaaggccatccgcttgcagtactttcaccacaagattaaactgaatgtaagaaaaaaacctgttccaaattttcaggatacaaaattcgtatcacacaaacaggaatggaaatggaggaatgatgccatgacaattaagaaaaagagaactaaaatcattttaccatcgattctgacagtcagtcttacttgtggtctgttacttgcgggatgtcagaagacacctgaccagagtgcagttgtcagtaaggccggaggattaagcgaggatgtaattgcagaccctttgaaagatggagagacgcagacactgaatctgccggaacactgggacacaacagtaacatggagtaatgaccgcggagtttttcacgcagatcagaaattagaatctgttacgacaggaaatcttccggtgattgaagtcagtcagaaaaaactggagcttgaacaattaaacggacttatttcctattttgcaggcggagagattttgtatcagacgcaggaacttaccagagaatactatcagaacctcttagataggattaagaacagggaaggattctatgctgacaacagtgtggagtatgatttaacagggcttgaaaagttagtggaagaagttcttcctcttgcgccagagcagacaccattgcaggaaattggacagattgaatacacatcaaaaaagacagatccggcgtatgaagcaaaaagaaaatcactggaagcttacggatatgatattcttccggataccacaaagcaggatggaatggagattcattttcaggcaacggttggtgcagatgcaaagggtacgatcaatgcagaaacttacgatccggaagcaggaaattatagtatcttctcctggtcagaaggaaatgggatcgaactggcaaccattgaaaactctctggcaagagagaatctcacagccgaatatggagttcctgcaggaagcgtaaaagaatcttttatggaaaaactacaagcactgaaggaccagatggaagaaaccgctctcttagaagagacagcagaagatgaagcagaaaaagttctgaaagatctgaacctcgaaaatatgcagttgttgtcatcagacaaaattctctggtatgcacagtctgattatccggaagccactatattagaacaacaggaagcgttatggaatgctgatccaaatcttggaaaaaccggttatcggcttacttacgttccttctgtttccggattaaaaataaatcaggataaaaccggaggatattcagatgatagtggatttgcatatgcaccttccatgccggtagagcagatttatattgtagtgacagaagatggaatccgttccttcaaatggaagggtatgagtcaggaagaaaagatagttacagaaaatgtaaaactccttgcatttgatgaaatagaaaaccgcctgatcgatcaggtgaaatatctttacccttccagtcagcctgctgaggacaagacgatatttggttatgatgttgcaactgtcgaactaggatatacttatataccggcatataagaatccacaaaatgcctggctggttccggcatggtttttcactataagcgagagtgaagatacaactgccgaacttggaacagccggaaaaaaaatagaaggatatcagaccgactacattgtattgaatgcaacagacggtggaagaataggttcttattggagatgatagaatatgaaaagaagacatcttttcagtacagaattgaaatatgactttggaaatcgaagattttatatctctgtactggcgttgtgtgcggttcttttgattgttgcacttccttatcgaaatcatctgatctctttcggtggatcaacagaagggaaagcctggttatgcaccttcaactatgcaatcacttcagaaaaagccttgcttttctttccactgttggttcctctggcaacagccgcagatatacaggaagaattacacagccgctatgcatggtttcttattaacagaataggaaaaagaaattatatttggatgaaaagttttggagttgcattcacaggtggtgccatttccgtttcagcggcaggaattgcattggttgtttttatagttatctgtagaaatatcccgactctgaatactttgcaaaatatatcagaggtaataagtatcacaggaattggatttatccgactttttctaaatggagcattgtggtctttatgcggttcactgacagcagttttgactaaaaataagtatctgagctgtgctgtcccattcattttatattatgtactaacagtgtttcaagaacgatattaccgtaattattttttcttaagtccaaaacagtgggcaagtccggcatattatggaaacggattctgtcttttggctctgcttctgatcagcagtcttctggcactggctttgcgtaaatgcgtggtaaggagagtggtggcatgaaaaaatcgcaatttaaaacggacattcatcaaatctttcttctaacaaaaagaaatttctctgactggggcaaaagtccaagaatctggatgacatttgcattagggtttgtactttgtctgatgttgacaaatcagattttagagcaggcacagacattccagacaccggtgcagatgttcgagccactgatctggaccttcggtgatgcgcagtctgtgatgctttcatcccttttactgctgttattatttgcagatatgccttttgtaaatcagatgacaccctattggctgatccggacaaagcgaagcgtatggatggcaagtcagatcctatatgtgatcctggctacttgcctttataccgtcttcctctgcctgacagaacttctaattgcaagtccctgggcttacgttggaaatgtatggagtcagaccgctgcaagcattggatatggaagtaataatcatcttacggttcctgtgtcaataaagacaatggaaatgacaacaccatataaatgtgcaatctgtgttgtatttcttatgcttttttattcgttatttattacttccgtcatgcttgtattaaatctacagaagggaagagccggaggcgttgttggcgcactcttgataaatctttatggaattcttctgactccggatatttttcaaaaagtttttcatctgggtggagggctttcctatcgggcaaatattctttgcggatggttatcacccttaaatcacgcaacatttccaatgcataatttcggatatgattatttgccacaaataaaaataagcatcctgttattccttgcagtgatatgtattttgcttttcatctcgagaaaatgtatcaaacgatataattttacattttctcaggttgatgaatcctgacggaataagaaaggggaaaattatgaaagctgctgtgaaagttaaaaatctaacaaaatcttttggcaaagaaaaagtattaaaaggaatcagtcatacctttgaggcaggaaaaatccacggaatcatgggatttaatggctccggtaaaactgtaatgttcaaatgcatctgcggttttcttcaacctgacagagggagcgtatatgtctatggaaaaagaattggaaaagatattgattttccggaaaataccggaatgattatcgagagtccgggatttcttccatatatcagtggatatgaaaacttaaaacgccttgcacaacttaatcgaaaaataggagatactgagatccgggatgcaatcgcaagagttggtcttgatccgttttctaaaaagaaagtaggtcaatattcacttgggatgagagaacgccttggaattgcacaggcgatcatggagcgaccaaaattattaattttagacgaaccattcaatggattggataaaagaggcgcacaggatgtctgcgaactctttgttgaattgaaagaaaaaggaacaactatcctgttagctgcacacaatgtgatggaaatggaatggttgtgtgatacagtgtgcgagatggatgccggacagttagaagttgtttatgaaaaatgaaataataattttttcaaattaaaagaagagagcgaacccaagaatattaaacgaatattcttcagttcgctctcttcgcacattgcgatataggtactccgacaaaatgatacatttctacgttctcaacatcagcttgaaattcatgttaaaatttgttagaatgatttgcgaacttacattctaaagagtttttagaaaacctttgaaaactaaggagaaattgatggaaaatattgacatagataagctgacaccgatgatgaaaatttattgcgagacgaaagagcagtacaaggattgtatcttattctaccgcctcggcgatttctacgaaatgttctttgacgatgccttgactgcatcccgagagcttgagatcacactgaccgggaaaagctgtggtctggatgaacgtgccccgatgtgcggaatcccataccatgccgtagaaggttacttgaaccgtcttgttgcgaagggatacaaagtcgcaatctgtgaacaggtagaagacccaaagactgcgaaggggatcgtaaaacgtgaggttgtaagaattgttacacccggaacgaatctggatacacaggcattagatgaaacgaagaataattacatcatgtgtatcgtctatattgcagaccgctatggagttgcaatcgcagatatttctaccggagattattttgtcacagaacttccggacagcagccgtctgatggatgagatttataaattcagtccgtctgagatcatctgcaacgaagcgttctatatgagcggtatggatctggatgcgatgagagacaagcttggaatcacgatttattctctcgattcctggtattttgatgatgctgtctgcaaagataagctgcttgagcatttcaaagtaaagaattttgcagggcttggacttgctgattatgactgtggaatcatcagtgccggagcacttctgatctatttatttgagacacagaaaaattcactttccaacctgacacatattacaccatatatcacaggaaaatatatgctgattgacagttctacacgtcgaaatctggagctgtgcgaaactttacgtgaaaagcagaagcgtggttcacttctctgggttcttgacaaaacacgtactgcaatgggcgcacgtacgcttcgcaaaaatgtagaacagcctttgatcgataaatccgagatcaaccgcagactggatgcagtagaagaactgaaaaatcaggccattgcccgtgaagagatccgggaatatttatctccggtctatgatctggagcgtctgatcacgaagatcacttacggttctgcaaatccgcgagacctcaccgcattcaaaggttctctggagatgctgccaccgatccgctatattttacaggatctgcaggcaccgcttttaaaagagatttatgaagatctggatgcattagaagatctctgcgagctcgtcacgaaagccattcgtgaggatccgccgcttgccatgaaagagggaaatattatccgcgacggttataacgaagaagttgataagcttcgccgggcgaaatcggacggaaaagactggcttgcaaaacttgagaatgatgagcgagaaaaaacaggtattaaaaatctaaaaataaaatataacaaagtatttggttattatctggaagtgacaaattcttataaagatcttgtcccggattattatacaagaaaacagacccttgcgaatgctgagcgttatatcacaccggagcttaaagaacttgaagacatgatccttggtgcagaagataagctgtatgcactggaatatgaactttacagcgaagtccgtgaaacgattgccggacaggtggagagaatccagcaaactgccaaagcagttgccgcactggatgcgttcagttctcttgcacttgttgcagagcgcaacaactacgtccgtccgaaaattaatgaaaaaggaatccttgatatcaaagaaggccgtcatccggtcgttgagcgaatgattccaaatgatatgtttattgccaatgatacttatctggatgataagaaacatagaatttcaatcatcacaggtccgaatatggcaggtaaatcaacttacatgcgtcagactgcattgatcgcactgatggctcagatcggatcgtttgtcccggcagagagcgcgaacatctgtctttccgaccgtattttcaccagagtcggagcatccgatgaccttgcttccggacagagtacattcatggttgagatgaccgaagttgccaatattttaagaaatgcaacctcaaaaagtcttctcattcttgatgaaatcggacgcggaacaagtacatttgacggtctgtcaattgcctgggctgttgtagaatacatcagcgacagcaaactgttgggagcaaaaactttattcgccacacattatcatgaactgacagaactcgaaggaaagattgataatgtcaacaactattgtattgctgtaaaagaaaagggcgatgacatcgtattcttacgaaagatcgtaaaaggcggggctgacaagagttatggtatccaggttgcaaaacttgccggcgttccggatcttgtcatttcccgtgcgaaggaaatcgtagaggaactcagcgatgaggatatcacaaaccgcgtcagtgagatcgcggccaaggaacatactgcaaagaaaaaaagtaaggcaaaaaaatatgacgaagtcgatatggcacagatgtctctgtttgacactgtaaaagatgatgacgtacttgatgaattgaaaaatatcgatgtcggaaatcttacaccgatcgatgctttaaatacaatctaccggttacagaataagctgaagaaccgttggtaaaaggaaaggcggaaatatgccacacattcatgtattagaccagatcacaattgataaaattgccgcaggtgaagtgattgagcgtccagcgtcaattgtaaaagaactcgttgaaaatgcgatcgacgcaggatctacttctgtaaaaatagagatcaaggacgggggcatttccttcatccgtattacagataatggctgtggcattccgcaggatgaagtgcagcgtgcttttctgcgccattctacaagcaagattgagacagtggaagacctgtctcacatcgcgtctttgggatttcgtggagaggcgctttcaagtattgcagccgtcacccggacggaactgatcacaaagacagccgatgcagagtttggtacccgctatgtcattgaaggtggaaaagaagtatccttggaagataccggtgcgccaaacgggacaactttcctcgtccatcagttattttacaatgttcctgcgagaagaaaatttttgaaaacaccaatgacagaggccggacatgtgcaggatctattaatgcatcttgccctgtctcatccggaagttgcttttcagtttttaaataacggacaggaaaaactgcgtacttccggaaatggaaaactgaaagatgtgatctacaatgtctatggccgtgacgtagcggctaacctgattgagatcgattatgagaaaaatggtatccatatcacaggttttctcggcaagccgatcatcacacgtggaaatcgtaactttgaaaatttcttcgtaaacggccgctatgtcaaaagtgcaatgatctccaaatccgtggaagacgcttatcgtgattttgtgatgcagcacaagtttccatttgcagttctgcattttcatctgagtggagaaaatgtagatatcaatgtgcatccgacaaagatggaacttcgcttctcacggcagcaggaggtttataataccgtctttgaagccgtacacaggactttgctggaaccggaactgatccagaaagcagaagttcctgatccggtggaatcgaacgaaaacaaggcagaaagaccggagcgagtgaaaaagacattcacatccgcttcgaccaaaaataaagaggataccggcagtccgtttcttcttcgtccgcgtaaggagaatgaaaaagtaacagctgcggaattgatcaaagaatccaagaaaacggttaaggatgatgttcaagatgaggattattttatccgtaagatgaaggagcgcgtactttcttaccataatcgttcttcttccgccgaagttgcagaccggaaagagattttccgtgcagatgaacagaaagacaaaattgctgaacatgtcaaatacgccgttgaagcagcagataagacagttgcaccggaaactgcggcagcagttcaaaaatccaaaccagctgttgaaatgcaaactgccaccaccaacaccgatgcagtatctgattgtgaaataaccgacgcaaaatcagaaccagaaaacggtacgcagatggatctctttgaagaaaatttcttaaaaagagatatccgtgcagaatataaattgatcggccaggtctttgacacctactggctcgtagaatttaaagataatctctacatcattgatcagcatgcggctcatgaacgcgtcttgtatgagcgtaccttgcgtgaaatgaaaagcagagaatttacttctcagtacttaagtcctccgatcattttaagcttatccatgcaggaagcacagcttctgaatgaaaatatggaccgcttttcacgcattggtttcgagattgaaccttttggtggagaagagtatgcagtccgtgcagtacctgacaatctgttcagtattgccaagaaagaacttctgatggagatgatcgatgatctgaccgaaggtctttctacttctatgacaccggagctgatcgatgagaaggttgcatccttgtcctgtaaggctgctgtaaagggaaataaccgtctttctgcacaggaagtagacaaactgatcggcgaactcctgacactggacaatccatatcactgtccgcatggacgaccgacgatcattgccatgacaaaacgtgatctggaaaagaaatttaaacgaattgtataaatggaatcgaggaaatatagatggaacagacaaacaaacgcccacttgtcattctgaccggtccaaccgctgtcggaaagactgctgcctccatcggacttgccaaagcgatcggcggagagatcatttctgctgactctatgcaggtctacaaggagatggacatcggctctgccaagatccgtccggaagagatggacggtgtgccgcatcatctggtagatgttcttgatccgtctgaggattttaacgttgttctctttcagcagatggcaaaagaagcaatggaaggaatctatcagcggggacatattccgatcgttgtcggcggaacaggattctatattcaggcattactttacgacattgatttcacagaaaataatgccgatactgcttatcgggaagaattagaagcacttgccaaaacccagggcgcagaatatcttcatgaaatgcttgaaaaagtagacccggaatctgcggaacagattcattttcataatataaaacgtgtgatccgcgcgctggaatattatcagcagaccggacagaagatttccgagcacaatgaggcggaacgagagaaagaatctgcttataactccgcatattttgtgctgacagatgatcgtaagattctctatgaccggattgataaacgtgtcgatctgatgatgcaggaaggacttcttgaagaagtcaatgcattaagattgcgcggacttaaaagagaaagtgttgcgatgcagggacttggatacaaagaactgtttggctattttgaaggagagtatcctttggaagaagccgtacgcattattaagagagacacaagacattttgccaagcgacagctgacctggtttagaagagaaagagatgtcatctggcttgataaaagtgagattggaagagaagataaacaactgatccaacagatgctcactgttttaaaggaaaaagaaatcattcattaggacatcaggctgcatttagataaaatgcagctttgccatgtaaatcaacaataaaaaacttaaaaagaaagaagaagaaaaatgaatacaccaactacagaaacaatttacgaacagctaggaatcagcaaagaagtctgggcattcggacagaagacagaagagaaactaaaagaacgttttgaagaatttgacagaaacgctgaatacaatcagttaaaagtaattcatgccatgcaggagaaccgcgtaagtgaaggatgctttaactatgtaagcggatatggatacaatgatcagggaagagatactttagaggatgtctatgcctctgtttttcatacagaagccgctctggtgcgcccacagatcacttgcggaacacacgcacttgccctcgcgcttgcagcgaatcttcgtcccggagacacactgttatctccggttggaaaaccatatgatacacttgaagaagtaatcggaatccgtccatctaacggctctcttgcagaatatggaatctcctataaacaggtagaacttctggaagatggatattttgattatcctgcgattgaaaaagctctggaagataaaacaatcaaactggcaacaatccagcgttccaaaggataccagacacgcccaagctactctgtagaaaaaatcggcgaactgattgcatttatcaaagagcgtcgcccggatgtcatctgtatggtagataactgttacggtgaattcgttgaacgtattgagccaagtgatgtcggtgcagacatgatcgtcggttctctgatcaaaaatccgggtggcggacttgccccaatcggcggatatgttgccggaagagctgatctgatcgaaaactgtgcttatcgtctgacttctccaggactcggtaaagaagtcggtgctacacttggtgttacacagtccttctatcagggattcttccttgcaccaactgttgtatgcggtgctttaaagggtgctacttttgcagcaaatatctacgaagctttaggatatccggtaattccgaacggttctgaatcccgtcatgatatcatccaggcggttacacttggatctgcagaaggtgttattgcattctgtaagggaattcaggcagctgctccggtagacagttatgtaagcccggaaccatgggcaatgccgggatatgacagcgatgtgatcatggcagctggtgctttcgttcagggttcttccattgaattaagtgcagacggaccagtaaaacctccgtacgctgtctatttccagggtggactcacatggtatcatgcaaagcttggtattctcaaatcactgcagagcgttattgatgcaggcgttctttctatcgagcgtgtgagagaacttctgtaaaacaatttttcgagagaattctatcgaaaattcagttgagttgaatgaattgttatgttaaaattcagacagatgtaatctgctaagaaagtaagaggatatgaattttaatgaacacaattgcaattataggtggcggtgcatcaggaatgatggccgccattttcgctgccagaaaaggagcgaaagttctccttctggagcaaaacgatagattgggtaagaaaatattagtgactggaaatggccggtgtaattatacgaatacttatcaggatacttcctgttatcgttcggagcagcctaactttatcacgcaggtactggatcaatttccggcggaaaaagtcattgcttttttccgagaacttggaatctatccaaaagacagaaatggatatctgtatccgtactctgatcaggcaagtgccatccgtgatgtattagaacaggaagtataccgtcttggagttgatgtacgtacaggaatctcctgtactggaatacagaaaacaaatgaacgattttccttgcagacatcacacggttctttaaccgtagatcaagtgattctctgcaatggatcaaaagccgcaccttccaccggttctgacggttccggatacactttagccagacagcttggacatcagataattcctgtacttcctgctctttgtgctttacattgtaccggaaagcatttccgcgcaattgccggagtacgtgcacagggaaaagtttcgttgtttgttgacggtgaattaactgctgctgataccggtgaacttcaattgaccgcctatggaatctcaggaattccggtattccagatcagccgttatgcgtcgaaagcattatatgagcagaaggaagttgttgccatgctggattttcttccggaatattcggttgataaagtaaaaattcttctgaaagaacgtgccaaccgccagccggaaaaaacagcagagcaattctttaccggcctgtttcatgaaaaactggccactgtatggctgaaatttgccaagatcaaaaaagagaagctatgcggcaatttcacagatgcagatattcagaggctggcatggatgatcaaggaattcaaatcacctgtaattaagacaaattcttatgaacaggcacagatctgctgtggcggtgttgatacgacacagattaatccagaaacaatggaatccagacttgtttccgggctttattttgccggagaactggtcgatgtagatgcaatctgcggtgggtataatctcacctgggcgtgggcaagcggttatgttgcaggacgctccgccgcatctgcataattgcctgctgctaacttgtaaccaatatctggatgatatactttaatattagatttcctgaaagaaaggatagataaatgatacgaattaatcagctgaaactgcagattccacacacggaagaagctcttgaaaagaagatacaaaagacacttcatctaaagaaaggggactcttttacttatcggattcaccgtcagtcattagacgcacgcagaaaaccggagttgttctatgtgtatacggttgatgtcactgtttccaatgagaatgctgttttaaagcattgtaaaggaaacatccagaaagtagaagagaagcattaccagattccatctcacggaacagagattctgaatgcccgtccggttgtcatcggcagcggtcctgccggactattctgcgcttatctgctcgcactggaaggataccgtcctttggttattgaacgtggtgcctgtgtagaagaacgtaagaaggatgtggatcgcttctgggagaccggtgtgcttgacccttcttccaatgtccagttcggtgaaggcggcgctggtacattttcagatggaaagttaaatacacttgtaaaagataagacaggacgtaaccgtttcgttcttgagactttcgtaaaattcggagcggacaaagatattttatatgcaaataagccgcatatcggtacagatgtcctgattgatgttgtaagccagatgcgtcaggagatcatttcgcttggcggtgaattctgttttcatacacaggtcacagatgttgatctgacatcaaaaacactgaaacttgttcacctctcagagaattccgcagaagaagtatctgccggagcagccgtttttgcgatcggtcacagcgcccgtgatacatttgaaatgctttataagcatcagattccgatgcgcgcaaaatcatttgccgtcggagtccgtatcgaacacccacaaacattgatcgatcattctcaatatggaagagatcggggaaatgatcttccggcagcagcatataaactgaccgagaacctggagaatggaagaggagtctatactttctgtatgtgtccgggtggatatgttgtaaatgcttcttctgaagagcatcgtctcgcagtcaacggaatgagctatcatgaccgttccggagaaaatgcaaacagtgctgtgatcgtcacagttactccggatgacttcggttctgaccatccgcttgccggaatttctttccagcgcagcttagaagaaaaagcttatcaggcaggacagggaaaagttcctgtccaacgttttggcgactttaaagaagatcagattacaacttcttatggtatggttcattcttgcatgaaaggagcttctgtctttggagatgtacgcggtatctttccagaagagatcgcacagtcgcttgaggatggaatcacagcaatggatcataagattcatggatttgcagataatgatgcattattatccggtgtggagagccgaacttcttcccctgtaagaattgaaagggatgagaactttgtctgtgcttcctgtgactggatctatccatgtggtgaaggggccggatatgccggtggaatcacttccgcagcgatggacggaatgaaggtcgccgaggcaatcattcaaaaatataaatcttaatcatttatgaaatttgtggttttttggtatcttctctatacacttttttgaaactgtgctaaaatgaatcgttgtattatgtcatcgcagtgatatgattcacatggaaaatagaaatacagaaacaatcaaaatgatgtatcttgaagaccgtccttatgaaaaatgcgagcagtacggtgcagaacatctgacagatgtggaacttttagctgttttacttcgtaccggaacgaaaggggagaattcgctccgacttgcccagaagattctgcatccaccatttggctctgaaggacttctcagcatcccacagtggtctatggaacaactgctgaagatcaaaggaatcggaaaggtaaaatccatccagattctttgtctggcagaacttgcaagacgtatggcgaaagcagaagcctcactgggattggatttttcctctccggacagtattgcacgttattatatggaagatcttcggcataagaaacgggaagtaatgaagcttttgcttctgaataccagatccaggctgatcagtgagatggatgtttcaacaggaaccataaattccacacttgtttctccacgggaactgtttgtggaagctttgcagaagaatgctgtatccattattcttttgcataatcatccgagtggagatccgacaccaagcaaagaagatcttctgacaacccggcgcatccgtgaagcaggggctttgatcggtatagaacttctcgatcacatcattattggagataattgttatttcagtttaagggagaaaggattcttttctcaagaatctgcaaatagataaggggatggagtgtatttatggccaggaatgtatatgggttagatcttggaacttatgatatcaagatttttgataagaaaaaagaccgcatatggcatgccaagaatgtaattgccatgaaagataaaaaatatattttttctgtcggagacgatgcttatgagatgtatgaaaaggctccgggaaatatacagatcatatttccgatgaagaatggtgtcattgcccgttttgatgacatgcaatatcttctcggagatcttttgaaggaagagcgtccgtttatccgtggggcagaatatgtgatcgctgttcctacagatgtcacagaagtagaaaagaaggctttctatgatcttgtgcttcattctgaagcgaaagcaaaatcagtaagaattgtagagcgcggtcttgcagacggacttggacttgggattgatgttctggaagaaccaggagcttttatcgccaatttaggtggaggaacaacagaactttccgttctttcctacggtggtattgttatgaaccgtctgcttaagatcggtggcgaacagctggatagtgcaattgccaatcttgtccgtcattctaaagattttataattggccgtccgactgccgaacggctgcgaaaagaatttggagtttttgaccagtccaccggaagctttcttactgtatacggcagagatatgatgcgcggcggtccgtcgcacattgacattccaatcagtcttgtacgggcagcgatcaaagaacctttgagagaatgtgtacaggccattcattccatgctcgaccgtacgcctcccgatgtccggagaaatattaataaaaacgggatttatattactggaggacttgctaatctgcgagggatttctacttatctggaagaaagtatcggtctgccggttcacatgaaaacagaccctgaactctgtgccgtcaaaggtctgcagaggatcatactgaataagaccttgtatagaaaattaagttactccatgttagacgaagattataggtggttaagataatatgaaaaaaaagaagaatcagacttctgttatgaacagatatttacttataggactttctgttttctgcatttttatgatgctgttatcttccttttcagacaaagtaggaggtccatttaaagttgttgcaaatgtaaccgttatccctcttcagcagggaatcaatcagattggtggctggatgggagatatgaaagacaattttcaaactctgaaacaggtacgcgcagaaaatacaaagcttcagaaacaggttgactctctgattacagaaaataacaatctgcagcaagaacgttatgagcttcagagactgcaggaattatatcagttggacaagaactatgcagattacaaaaaaactgctgcgcatgtaatcgggaaagattccggaaactggttcagtacatttaccattgacaaaggaagtaaagacggtattgccgcagatatgaacgtaatggccggaagcggtcttgtcggcattgtcacagaagttggtccaacctgggcaaaagtccgttctattatcgatgattcaagtaatgtaagtgcaatggtactttctacttctgaccgttgtatcgtaagtggagatctgtcacttatgagtgataaccagattcgttttggtcagatggaaaacaatgataatacggtttccgtcggagaccagatcgtcacttcttatattagtgataaatacctgcagggaatcctgattggatatgtcagtgaagtaacggtcgactctaacaatctgactcgttccggatatattacaccggctgtagattttaaaaatcttcaggaagttcttgttatcacaacaacgaaagcggatttggttggatccaatcagagcgaataggagtgaatactcatgaaattaatgaaatttaaaagagttgctgtaactgtactgatcgtacttgcagcatatctgctccagtgtaccttattcaatcatctggaacttgccggaattaaacctaacctgattctgattgtcacagcatcctttggttttatgcgtgggcagaaagaaggaatgctggtcggtttctttgccggccttatcacagatattcagtttggtacaattttgggattttatgcattactttacctggtaatcggttttgtaaacggattatttgaacagctttattttgatgaagatatcaagctgccgttatttttgatttctgtcagcgaatttctctacggtatcatcatttatttgctcatgttcatgttgcgaagtgattttaactttttatattatctcaaccgcatcatcgttcctgaactgatttacacaatcgtgatcacactgggattatacccactgattttatttattaaccacaaacttgaagcagaagaaaaaaggagtgcaagtaaatttgtttagaaatattttagaccgtctgaaagaagccggagcttacctgatgcagtcaagactcgttactttgatcattatattttgtgtcagttcttccatcctgatcggaagattattctatcttcagatcgtaaaagggtctgattatcttgaaaactacgaatattctatccgccggacgacatccgttgcagcaacacgcggaaatatttatgaccgtaatggaaatctgctggcttataaccagctggcttattccgtgacaattaatctgtcaaccgttgaaaactccatcacaacagataaacgttctgaaaaaaatgcggcattaaataaaatcctggatcaggttctttctatcgtagaatcaaatggagattctgttgtttcaagttttggtatcatcctggattcctccggaacctatcagtttacacagtcaagcgatacccagaagctccgttttattgcagatgtctatggaaaaagaacaatagatgagcttacagaaaagcaacagaaccaaagtgcagcagatatcattcattatctttgtaccgatgaaaaatatggatatggccttgatgacagcacattagagcctgcttatattttaaagatcatcaacatgcgttatgcaatggcattaaatgcatatcagcagtatattgatacagttcttgcatccgatgtaagtgacgaaacagcagcagcaattatggagaataaggacattcttaccggtgttgacatttcagaagattctatccggaaatataccgatggaatgtattttgcatctattatcggatataccggacagatttcccaggatgaatatgatgcgctggacaaggatgaaaagaaaaagtactctctgtctgatattgtaggaaaggccggcattgaacaaagcatggacaatgtccttcagggcacaaaaggtgaaaaaaccgtgtatgtagataacctcggacgtgtaactgatactgtcagccggaaagatcctgaagccggaaatgatgtatatctgacgattgataaaaatcttcaggaaagtacttataaacttctggaagagaagattgccggaattgttttatccaaactacagaatgttctggaatacgatacatccagcgtagatgactctaagaatctgatcatcccggtcagcgatgcatattataatctgattggaaatgccgtcatcgattcaggacacttttcaagcagtgatgcaaaaactgccgagcagcaggtttattccattttccaggggaaaaagactgagacgatttccctgcttgaatcagaacttcagaactcacaggccagcgcatatacagatctttccaatgaaatgaaagcatatatggattacatctgtgataccctgctgacaaaggatacaggcatccttatgtcagatcagattgataagaatgatgctacttatattgcatgggcaaaagatgagacaatcaatttatatacttacctgaattatgcgatttctaaaaactggatcgatacttccaaacttggaagcagttcttattccagttcagaagagatttatcaggagattttaaaatatttaaaagaatatttagcagatgacagtaatttcgacaaacttctctacaaatatcttataaaatcaggtagtgttactggtgaacaagtttgtgctatcgtatatgaacagggtattcttcctatggatgactcgacctataacggattactcaacggaaagacaaatgctttttcctggatcaagagcaagctggaaaaccttgaacttacacctggtgaactggcacttgagccatgttctgctggtgcagttgtaacaaatccaaataccggagaagttttagcatgtgtttcttaccctggatatgacaataatcgtctctcaaacgtaatggatcgttcttattatgtgaagttgagcatgggtatgtcacgtaccttctacaacagagcgacccaggagaagacagcaccaggttctacttataaaatggtttcttctgtagccggtctgacagaaggggtaattaacggaaactcctatatcagttgttcaggtgtatttgacaagatcacaccaagtccaaaatgctggatttatccaagtgctcatggaagtctgaatgtagtaggtgcactgcagcattcctgtaatgatttcttctatgaagttggttatcgtcttggacaagactcgaatggtaactatgacagtgataccggtcttgaaaaactggcaaaatatgcaaaaatgtttggatttgaccagacgtcaggaatcgaaattcctgaatcacaacctcagatttctgattctgactctgttcgatctgccattggacagggtaccaacaactatactgtcagccagatcaaccgttatgtgacagctgttgcaaacagaggaactgtttacagtctttctctcattgataaaacaaccgattcgaatggaaaactgattaaagattatactccggaagttgtaaatcagatggatgagatcagctcaagtacatgggatctggtacacaatggaatggaaagcatggtaaaaagcagctccaccttcgccggaatggatatttccatgggaggaaaaaccggaactgcccagtatagtaagatacatgcagataatgttctgtttgtcggttatgcgccggcagattcacctgaaatttcaattgctgtccgcattgcaaatggatatgcgtctacctatgcagctgaaattggaagagatatcacaaaagtgtacttcaatccagaatccgccgatgaactgcttcaaggatatgcttcttctttaggaactgcaggagccggtgattaattaagataacgaaaggggatgggatcatgagtgaactggtaacaataaaaagcagtcattccggtatagagctgcggcttaatgccaaactcccattcccggatcttttaaaagctgtagaagagaaattccgacaatctgctgattttttcaagaatgcaaagatggcagtttcatttagcggaaggacactttccatcagcgaagaggagcagttaatacaggttattacgcagacgacaaaccttgagattatctgtatcattgatcatgatgaacgcaaggaactgatctacaaaaaagcggtagcacagtgtttatctgaacgtgaaaaatcagatggacaattctatcgcggaacattaaagcgaagacagcttcttgaatccgaatccagcattgtgatcttaggagatgttgaattcggagctaaagtagttgcaaaaggaaatattatcattctcggtactctctatggatctgttcatgcgggagctgccggtgacaggaatgcttttatcattgctctctccatgcagccgcagcgacttgtaatcggagatattgaagcaaaacgtcaactgatctatcaggacagcctttccatcaacggaccgcaaattgcagttgttgacggaaaaagaatttaccttgatccactgatagaataaatctttggaaagacataagcatgggaaataggaggaatattcaacatgggtgaagtaatcgtcattacatcgggaaagggcggtgttggaaaaacaacaacaacagcgaatattggaattggtctgtcttcagcaggaaaaaaagttcttgtaattgatacagatctcggacttcgaaatctggatgttgttcttggacttgaaaatcgcattgtctacaatcttgttgacgtcattgaaagcaaatgtcgtctgaaacaggcagtgatcaaagatacgcgatttgaaaatctgtacctgctcccatctgcccagacaaaagataagacaagcgtatcaccggaacagatgaaaaaactgattgacgaactaaaagatgattatgacttcattcttttagattgtccagcaggaattgaacagggctttaaaaatgcaattgcaggcgcacagcgttccattgttgttacaacacctgaagtttcctcaattcgtgatgctgacagaattatcggactgcttgaagcttccggcatccggaaaaatgaacttctgatcaatcgtctgcgcgttgacatggttcgcagaggtgatatgatgtctgtagaggatgtcacggaaattcttgcgattgatctgcttggagtcatcccggatgatgagtctgttgttgttgcaaccaatcagggagaaccggtagtcggcgaagattccttagccggaaaatgttaccagaatatctgtagacgtctgttaggagaagaagtcccgatttccgattttaatcataaacccggacttcgcagtaaactctccagtctttttcataagaactaggaggtcacattatgagtgtaccttctgttacaattgcaaaagacaggttgcgaaatttgctaattactgacagaattcaatgtacacccgatatgatagaatttctgacatcggatttatatcagacgatttctaaatacatagaaatctccccggaacaatttgatgtcaaaataacacgcacggatatacatataaaatatacaggagaaaaacattgaaatcattttttactaatttgaaacagcgttataatattagagattataaaatcagtctggtttttctggtcactctgatttcactggtcggaatccttatggtccgaagtgcaagacctgatttaatgaatcgtcagattatgggcgtttgtcttggtctgattgttatgtttattatctctttcattgattataaatggattttaaacctatattggccgctttatgctctgaatattgttatgctcctggctgttttggtttttggaacaaaagtaaatggcgcgagaagatggctgaaccttggatttacacaattccagccttccgaccttacaaaaatccttatgattctgttctttgcaaaattcttaatggaacgagagcagaagattaaagaacccaaaacgattattcaggcaattgctttaatccttccatcacttgcattgatttacaagcagccaaacttgtctacaacaatttgtattgccgcattgtttgctgtccttctttaccttggaggattaagctacaaactcattggaaccgttcttgtaatcacaataccgacgatcattatactgcttgttgttgcaatacagccaaaccagccgttcttaaaagactatcagcaggaacgtatccttgcatggctggaacctgaaaagtatgccgacgacgaatcttaccagcagttaaattccgttatggcaattgggtccggacagctgaccggaaaagggtatgataatgacgcaacaacatccgttaagaacggaaatttcgtatctgagccgcaaacagactttatttttgcaataattggtgaagaattaggatttgtgggttgttgtggagtcataattttgttattattaattgtgatagagtgtatcttaattggtttgaaggccaaagatacaggagggcggatcatttgcggaggcgttgcttcactgattggaatccagagctttattaacgtcagtgtagctacaatgattttcccaaatacaggcttgtccctcccatttgtcagttatggactgacttccgtagtatgttttttcatgggaatcggttttgtattaaatgtaggcttacagcctaataaatatcagtaaagagaggataccactatgaatatcggattagtagcgcatgatgcgaagaaaaaattgatgcagaatttctgcattgcataccgtgggatactcagtaagcataatttatatgcaacagaaaccaccggtatactggtcgagaatgtaacaaacttaagcattcacaaatatcttgctggacatctcggaggaaaacagcagctcggctcacagattgaacacaatcagatggatcttttgattttcttccgtgatccactgacacctcactcacatgaaccggatgttaatgacattgttaagctttgtgatatttataacattccgatcgcaacaaatatcgcaactgctgaagcattgatccttgctcttgacagaggcgaccttgactggcgggagatgtatcgataatatgagtaaaccatataaaaagaagagaagacgaagaaagcaacggcattctgtcagccgcatacttattcctgtcatatgtcttattgttgtattgtccggagctgtcggcggagtctggtattacaaagaatatggtggtgatcctgtccggacatatgagacagccacttataactctaatttataccagggaagtttgtttgctgatgatttatgcgtcgctgctgatgatgtggctctcactggatttgatgatgaggattctcttcatgccgcaggattattcaatctaaatgatgaaacagttgaatatggatataaactttatgataaattatatcctgcaagtacaacaaagcttatgactgcataccttgcttttaagtacggtaatatggatgacattgtaactgtttctgacagtgtttcaagctttgcctctgatgaagtagtctgcaacctgcagcctggtgatacagtgacactttatgatttattatgtggtcttttacttcgttcaggtaatgattgtggtgttgctatcgctgaacatatttccggaagtgtagaagcttttgctgagcttatgaactcagaagcgaaagctcttggtgccactggcagtcatttcgtgaatcctcacggacttcataatgaaaaccactatacaacagcatatgacctgtatctgatctttaatgcctgcattcaggatcagagatttatggacattatttccatggattcttatacaatgaatcttaccggagcagatggtacaacaagaacatttgatgtagtcccaaccaactattattcctcagggaagatcaatgcccctgaagggattcgtgtatttggcggtaagaccggtaccacagatgaagcagggtgctgtgtgatcctttatagcgaagatctggaaaagaatccttatatttccattattatgggggctgaagataagagttttctttaccaggagatgaaccggcttcttgaggctggagaaacaactaaaacagaataaagaaaaaccgatacgaaaaagccatgtggcacagagcaacaaattagaagctttcatttttaatctgtccgcatggtttttttctatcttatttcatgtaatattctcctttaccgtttcctgttttcagtaacgctcttttgatttattaatatgtattcttcccctgaaaggctggaaatatacacaaaaaaatgatatactaacaaagttaaagcagaaatgacaggaggtaatatttttatcttggcaaagaaaaaaaacaagtctgtaaatataaaaagatataaggcaaaaaaagaatttaatattggaatgtttctgtttgccgttgtatttatttatcttattgttactattaccgcatatcttttagaagataagccttctatttatgaagtgcgggagggcagtattgtgaaggataatacctataccggattgatcatccgccaggaaacaactgtaaatgcagaatcagacggctacattaattattatcagaatgggaacagcaaagtcaaatatggcgcacctgtttatgcaatttcaaagaatgctttgaattttgatgattcatctacggaatcatcttcaactgcagatcttagtcctgatgttcaatcaggacttgtgacacaacttcagacattcaatgaaaactatgacaattccaacttttcaagtatctataccttaaagaatgagctgcaaaatacattgcaaaatgcataccgcacaactaaaactgcgcagcttgcatctgtaattgagagcagcggacaaactgtcacaaccgcttctgccggacaggacggaattgtttcctatacgattgatggtttagagtccttaactgttgacaattttacagcagataattttaataaaacaaattataaagtaactgagcttaccgatcagatgaagatatcaagcggttcaccggcttaccgcttgattaccagtgaaaactggtccgtagtgatacctttaaaagaagacaccgcaaaagaatttcagaaatctaatttacagaatgtgcaggtccgcatagataaagacagtgaaaagatgtggtccgctttctctgttcttgaacgagatgggaatttctatggtgttctgacctttgacaactctatgattcgttatgcatcagagcgttttctgaacatagaacttatcttagaagatgagtgtggcctgaagattccaaaatctgccgtagtagaagagcagttctttgtaattcctcatgattacattacaaacggaggtaacagctctttagaaggtgttatggttttggattcaaaaggaactgcctcatttcaggctgttgatatctatgacacctccgatgatggagaagtttatttaagtcgagatcagctgaaatctggaacagtgattgtaaaaccggattcttctgatacttatacgattgatacccaaaagccattaaagggagtctacaatatcaataaaggatatgctgtttttaaaaaagtatccattttatgtgaaagcgacgaatattacattgttcaggaaggagattcttacggactttcaaattacgatcatatcgtacaaaacggagccggtgtttcctctgatgatgttgtatttcagtgatttgattttgtagccctttgaaaattggatacaaaatcaaaaagaggataatcaaatttaaaaaaggagagataacttatgctagaaacacagttaaaagaagtagaagcaaagattcaggcagcctgtgaccgtgccggacgcaagcgggaagaagttacattgattgccgtaagtaagacaaaaccgatagaaatgcttcaggaagcttacgatctcggtgtccgtgtgtttggtgagaataaagtgcaggaaatcacagccaaatacgatgcactccctgatgatatccactggcacatgatcggacatctgcagaccaataaggtaaaatatattattgataaagtagatctgatccactctgtcgattctgtcaagcttgcagagacaattgaaaaggaagctgcaaaacataatcttacagctaatattttaattgaagtaaatgttgctcaggaagaaagtaagtttggacttaaaacagaagaagttctcccgtttattgaaaagattgcaaatttcgaacatatcaaggtctgcggactgatgacaattgcaccttttgtcgataacccggaagaaaatcgtcaaattttcgcaaatttacataaattatctgttgacattaatgagaaaaacattgataatgtttatgtgaacatactttcaatgggaatgaccaatgattacgaggttgccatagaagagggagcaactatggttcgagttggaactggtatctttggtgcaaggaactataatatctgacttaatttattaacctgatgaatgagttactgtttacaatatttttgaacagtaattgaatagtatcattttttcgttggatcgtatgaataaaaaagagcgccacctgaaaaaggggacaagataggagtgtaaaaatgggtgtatttgataaatttcttgacatcatgaagttaaatgatgacgattatgatgacgatgaattttatgatgatgatgattttgcagatgacggtgattttgaggaaaaaccgcgtcgttctttcttcggtaagaagaataataaagaggaatctttcaatgactttgatgctgatgaagataagacgtttcagccttctgcttccagcaaggttacaccaatgcgtcctgctgcaaaacacggcggaaacatggaagtatgcgttgtaaaaccaacttctgtagatgattcccgtgagatcacagagacattacttgcaggccgtactgtaatccttaacttagaaggtatggatcttgagatcgcacagagaattattgattttatttccggagcagcatttgcgatcagcggaaaccttcagaagatttccagctatatcttccttgttacacctacaaatgttgatatttccggtgatcttcaggatcttctcagtggatctatggaaacaccaagtgttcgtggaagatactagaatttaacttcaactataggaactggattttagaattattatgataaaagaaaatcagaaaaaagaaacaaagcttttggaacacagatttattgaactttccagaattgcttttgaacgtgaaattgttacatattcggattttcttaacctgaatgatcagaatatcctgcataccctgccaaagaacaagctttattcaagatatgtcctctttggcgggtatgatatggcggagcgtcagatggctgcatttatccctgaggctctttctttgcgttatggggtatctgatattactccgaaagagattgattatccgttttgtgccgtgaaaatagaaccaaaaaataaaagattttccgaagacctgactcacagggattttcttggttccatattaaatcttgggattgaccgttcaaaaaccggagatattcttgtgacagaagattcagcacttctttttatcaataaggaccttgtatctgttgtaacagaagacttaacccgggttcgccacactgttatagatagttctgtcatcaacttagatatgataaactacacacctgatttccagcagataaaaggaactgtttcatctgttcgcttagacagcctacttccacttgcattttcttcttccagaagtaaactgtccggactcattgaaggcgcaaaggtctttgtaaacggcaaattgattacaagcaatggatatcaggtaaaagaaggagatcttatctctgtacgcggattaggtaagttccgttttgaggaagcggggaaaatcactaaaaagaatcggatcagtgtaactattcagaaatatgtataatctaaaaagcttagaaaagaggagcttatcgactcatgaataatacaaaaacaaagacaaagagttatcttttcgctgccattgggtttctgctcacattagcacttgaccaatggaccaaatatcttgcatctactattttacgccgtctcgagtctttctctttgatttccggagtttttgaacttcgctatcttgagaaccgcggagctgcatttggtattatgcagaatcgacagattgtgtttgtggtcggaggtatttttatacttgctgttattttgtatctgtaccagaagatgccatttacaccacattacagaccactgcgtatctgtgctgtactgcttgcatctggagccgtgggaaatatgatcgatcgtgtgaaacttgattatgttgttgactttttctatttccgactgattgattttccaatctttaatgttgcagactgctatgttgtaattgcatgtattttatttattgttctcattttattttattataaggacgacaacgattttgagtttttaaattttaagaacagataaaaacgcacaacaggaaggattctgaaagcttatggaagaacttcattttaatgcggatattacaggggaaaggatcgataaattccttgacgggagaatagagagcctttcccgttcttatatccagaaattaattaaagaaaaaaaaattcttgtaaatcaattaccggttaaagcgaattacaagttaacaacaggggatactatcattcttcagatccctgacccggaaccacttgatattcagcctgaaaatattcctctggatattctctatgaagatgatgacattctcgtcgttaacaaaccaaaaggaatggttgtacatcctgcaccgggacattacagccatacgctggtcaatgcggttctatatcactgtggagaaaacctgtcgggaatcaatggtgtaatccgtccgggaatcgtccatcggattgacatgaatacaaccggttcacttctgatctgtaaaaacgataaagcccatcagattcttgcagaacaattgaaagaacattctatcacaagaaagtatcacgctatcgtacatggcaatctgaaggaggatacaggcactgtaaacgctccgattggtcggcaccctacagatcgtaagaagatgagtacaaaagcaccaaatgggcgacatgcagtcactcattaccgtgtattggaaagatttggtaattttacctacattgagtgccagcttgaaaccggtcggacacatcagattcgtgttcatatgtctagtatcggacatccaattctgggcgatgagatttatggtcctgcaaaatgtccttataaactccagggacagactttgcatgcaaaaatccttggtatcactcatccatctacaggagaatacatagaatttgacgcacctttgccagactattttaaagagttattaaataaattaagaaaacaaaactaagtataggaaatagtatgggaaatagtgaattgacattgtcttttttcatctttttggttataatatatataagatttcgcatagacttgaaaaggagtgtggcttattatgaagacaaatactattataacaatcggacgtcagtacggaagtggtggaaaagagatcggacatttcgttgccgaagcatttggaattaaattatacgacaaggaaatgcttgcgcgtgcagcaaaagaaagtggtatctgtgaggaattatttgagactcatgacgaaaagccaacgaacagttttctatattctcttgtgatggatacatattctatgggatatgccggcaacacatacacggagatgcctatcaatcacaaagtttttcttgcacagtttgatgcaattaaaaagattgcagatgagggaccatgtgtcctggtaggccgttgtgcagattatgcacttgaatcctatccaaatgttgtcagcatcttcattcgtgcagatatggaagatcgtattcgtcgtgtagcaacaagacttgatcttacggatgcgaaagcaaaagatctgatcaataagacggataaaaagagagcaagctattacaattattatacaaacaagaagtggggcgaggcagccagctatgagctttgcttaaacagttctgaactcggagtacaaggtacagcgaaagcaattgaacagtatattcttttaaaagaaagtattgaaaaagaagccagaaatattgtttaatcttatttattaaaatgtatagtgcaaaggatacagaagagcagtagtgcattctttctgtatcctttttatctattcttattctttttacttcctatacttcacgaagctttacagcacctgccgcctgacggcgtcggtcttcatcgatcgctgcataatgtttctttgttgtattgacatctttatgccctagaacatctgcgacaagataaatgtctccggtttctttataaagtgctgttccgtaagtgctgcgcagtttatgtggagttatcttcttattcggagtgacctccctggcgtacttctttaccatattttcaactgcctgaacgcccatacgttttcgctgggtagacaagaacagtgcgttttcgtgaccggagagtggtatagcttgcttcctggtcgtgtaaagatacgtctttaatgcattctcaacctcttcaccgaaatacacaaccatctgattcccaccttttcgtgttacagtaattccgttattcttaaaatcaatatcctgaagatccagtccaacacattctgatacacggattcctgttccaagcagaagcgtcagaattgccagatctcgattttttgtcttttcaaaataggctttccgctgacctgtaagattatcccctccatgatcaacataatccaggagcattgcgatctcatccgtatcgagccgtataatcgctttctcatgcagcttaggcatctctacaagcaacgtagggttcttgctgataatttgccgtttaaaataatatccataaaaactacgaagcgcagacatctttcttgcaagtcccttttctgtgttcgtgatacatttttcttcgtcattcttatagaccttcagatattcctggtattcctcaatatctacaggctccaggcgttccaaatcatgtacctcaaattgttcgatcgtataatttttataaaccggattattctccataaggaaatgaaagaaaacacggatatcataggcataagaaatcctggtccgcgcagatgtcgttggttccaccgcacgaaaataatcctttgcaaatggaggcaatgtcttcaggatctctctgagacgtaatgtgttatctatatatgtctgttcatgatatgtttttctgttagaagtttctgccatattaaaagctcctttatagattcaaatttactgaaaaccccatatttcttatatattttaacataagtactgtttttcgtctatatcttttggaaaaatcggtatttgtcgtatagattgatttctgttaataaaatccgaagagactatctgctgatatttaaagcgctatttctggaaagcagatagcaatcttcttcggattcagggagtgtatatatcaatacatagggtgtatattgataccatttataatttttcgtaagcgatcatcaggtattgacctgcgtgaatcgtatctgaatcaagatgattcatcaccttaagtgcttctacatattcgcttatggagctatatccgtctgtaattgtttcttctgcaatgctccaaaggctgtcacctggttcgattaatctgcttgtgtaatagatctcaacagcatctgtggctctctgattatctatttcctttgccgaaactcggaacattccaaagtacatgcagctgcagagaataaaaagaatactgcatattaccaaaccagaatgacgaataacaccatgtttcttctttgaatttactgaatgatttcctgaatactttttcataatccttttcctctcttttcgcttactgtatacctatcttctgttatttctatgtatcgaacatctgttcttttatgttttcattatatcgttcgaacaaatgtttgtcaagcattttacttcataaaaccgaacatattttcgcaacaaatgtttgctttctaaaaaatgctgtgttattatgttcttatgattatagtagattcggagggaacaatatgtcagaagggaatattactcctaagcaaaaagagattttagaatatataaaagaccagattttaacaagaggctttccaccggcagttcgtgagatctgtgaggctgtgaatttaaagtctacctcttccgttcattcgcatctggagacgctggaaaagaatggttacataagaagagaccctaccaagcctcgtgcaattgagattctggatgataatttcaacctgacaagaagagagatggtgaatattccgatcataggccgtgtcgctgccggcgaaccgcttcttgcagaacagaatattgaagattattttcctattcctgtagaatatatgccaaacaagcagacatttatgcttcaggtacaaggtgaaagtatgatcaatgcaggaattctgagtggggattatgttattgttgagcagactccatctgctgaaaatggggaacaggtagttgcactgattgaagatggcgctacagtcaagactttctatcgtgaagaaggtattatccgcctgcagccggaaaatgatgcatatgatccgattattcttacagatgtcactatccttggcaaggtaatcggtgttatccgtatgtattaaatctcattactggatataggatttttaattagaactcaaagtataaaaaactggcagagtgtagtactccactactcttctgccagttttttataactctcattatttatgcttcaagatcttcaacagacacatgatgtccatctttccagattctctccaaattgtagaactgtctgttctctctgtcaaatacatgtacaataatatcaccaaaatcaagcaacacccatcttccggatgcatttccttctctctgtaccagagaatatcctgctttatgcagttcttcctccacattgtccacaagagcattcacctgactgtcactgttaccatttacaatcaggaaataatctgcaagtacagacacgcctgagatatcgatgatctggatatcttctccttttttatcactgagggctgtatatgccagctttgccatttcttttgactgattcatcattattctcctttatcgctataatattgataagtttcaatgctcatcggatctaccggcttaccattcttacgcagataattaaccgtattccctgcacaaagacagattgcgtggtcaatatcgacaaacacagtttcacggatcttttgaagaccaggaattatctttctgttcggttcgatataatcagcaatataaataatcttctcaagcattgtcatcttcggtcgtcctgttgtatgccatgtaattgcgcttaaaacgcctttatcgatcacaccatactctttctctgcgaaatatgctcccagtttcgcatgaaccaatgcaggcatctcaagttctgattgtgtaagcagaataccgtgtttttgacatctctcaacctgttcctgcacagaaccatactttccacaatcatgcaggagtcctgccatcatagcatcatcgatatcttcatgataacgcattgcaagagatgctgctgtatacataactccgattgtatgttcaaaacgatcttttttcagctttttttccagttgttttctaatgtcaacgaaagcttccttcataatcgtattctgtctcctctctggttactgttcaccgccgttttggcaggtgcagataaaatatgctttaaatatatagtttcttttctttgatgtaatccgcgacaacatcaggcaccatataacgcacgctgagcccctttgctgccctttctcttattgtagtggaggaaatctctaccaacggtgcgcgaagcagttctatatgcgctccgtatgcttccgtgagatatcgtatctgtcccttcattgctgaagcatctttgtcgtcacgcattgctgcaagaatcgtacaggtcgtaaaaatttttctgaaatctttccactcttcaaaagcaaacagagaatccgctccgagaataaaataaaattcatcgtttgggtagatctcgttaaaatgcctcattgtctgatacgtataagaatgcttcttcgtatccgcttctgaaagattcaatgagaaattcggattactttttattgcaagacgaaccatctcgatcctgtgatgcattgcttcttctgtatcgagtgtctctttgtgtggaggatttccattcggtaaaaaccagatctcatcaagcccaaaatcttcataagcaaactcaccaagaagaagatgtcctatatgaattggttcaaaggttccgcccataataccaatcttcattgtctgtacctgttccttttctactgtaagaaacacgctttgcgagtttcttatattcaaattcagcttccgaatcataaactcagaagctgaataataattattttggaagctgaattttctttttatcgtcttttccttctttgtaaagaacgattttctttccgatcacctgaacaacctgagactgtgttctctctgcaagtgtctctgcgatttctctcggatcatccatgcagttcttcaggacactgatcttgatcagctcacgtgcttccagtgcctcggcaattgcctccgtaagtcccggattcatgcttgcttttccaacctggaaaatcggatccattgtcattgcaagtccttttaaataggctctttgttttgtagtcataatattctccttatttataatagtcaaactgaagtccatacattctaactgtatcaccttcctggatacctgctttttcaagatctgccaaaataccagaatcttttaagaacttttggaagaatgcaaatcccttctctgaatcaagattcgtatatccaagcattttctcaatcttcggaccttcaactacatacattccatctgcctgttctaccgtataaggaagatcttcatagatcagttcatcatccgggaagtattcctgctcgaatactaccggtttctgatccagcttctgaagctcgttacttacgtagtagagaagatcggagattccttttcctgtagctccggagataggaaatactttgattccctttggctcaaattcatctttcaagcgctgaaccggatcatcttccggatcatagatcagatccgtcttgtttgctgcgattacctgcggacgttccgcaatttccggattgtaagcagcaagctctgcattgatcttatgaatatcatcaaccggatctcttccttctgttcctgctgcatctacaacatggatcattaactttgttctctctatatggcgaaggaactcatgtccaagccctacaccttcggatgcaccctcgatcaatccaggaatatcagccataacaaatccctttgctccatcaagatcaacaacaccaagattcggattcaatgttgtgaaatgatagttcgcaattttcggttccgcatttgtaacacgggaaagcaatgtagatttaccaacgttcgggaaaccgatcagaccaacatctgcgattacctttaattccagattcacttccagctctcttgccggctgtcccggctgtgcatacttcggaacctgcatggtggaagtagcaaaatgctgatttccaagtccgcctcgtccaccttttaagacaacctgacgtctgttctctccggacatatcagcaatgacttttcctgaaacagattctttaatcactgttccttccggtacacgaagaacaaggtcttttccgtccttaccatgacagcggcgctttccgccctgttccccatcttcggcagcaaattttctcttatgtctgtagtcaacaagagtattcagcccttcatctacttcgaagatcaggtctccgccgtgtccaccgtctccaccgtccggtccgccgtttggtacatacagttctctgcggaagctgcagtgaccgtctccgcctttaccggaacggatcaatatcttagctctgtctgcaaacatatttttctcctcttaatttgtatcaacaactgtttctgtatctttattcacatcatatatgcgtaaatttcttcatcatctgacaataaaagatttctttgaaagaaaaagcctcagaccttaaaaaacgtctgaggcttccttttgccatgtatgcgagtgaaaagattccgtcggaactttccagccaaaactgattactcagctactggatagatagaaacctgtttcttatctcttccttttctttcaaatcttactacaccgtctacaagtgcaaacagagtgtcatctccaccgcgtcctacgttaagtcctggatggatctttgttccacgctgtctgtaaagaatgttaccagcttttacaaactgtccgtctgctcttttagcgcccagtctctttgcctcggagtcacgaccgttctttgtagaaccaactccttttttatgagcgaaaaactgaagattcattttcatcatggtaattacacctccttgaaaattatgtcgatatatttctcgtagtcattgctgtcttctatctcttccagaccaagaatcatggaatccagcaataatgtggcatcatgtgatggtattccgtcaaaacggaactcaatacttccggtatcttcatccgaaacgcagcttgtctcatcatctgtaaaacgctcaatcgaattcagcgcattgatcacgagagcggatactccggcacagacaatgtcttcaccggcctctgcatatcccgcatgaccctccatatcaaacccagcatattcctgccgttcggtcttataaatggttaccttaatcatcagaaacagattaagcgttgatcttttcgatctttacttctgtgtactgctgtctgtgaccgtttttcttatggtatccagattttctcttatacttgtaaacgataactttcttagctttaccgtcaccgattacagaagctgtaactgttgcaccttcaactgtcgggttaccaacaaccatcttgtcgttgttaactgcaagtacctggtcaaatgtataagtctcaccagcttctaccccaagtttctctactctaatgatatcgccttcagctactttgtactgtttaccacctgttgctataatcgcgtacatatggcacctcctattatcattactcgccaactatggtgtctgaaatcagaacttaaatacctcgttgtgcggcatactcatatatattaacttgcgaatttagatttgtcaatagggttcatctaatttttttattttttcataacagtattcaataatactttttcttgttatgattccaatgaatttcttctggtcatccacaaccggaacaaaattctgattcatcgctttctgaagaagatcctccatatcagcatctgccgatacagcctcataatctgcttttcttggaaaatcctggataaaaattgtctctgcctctttcagattcagattcgtatacttcttgattccccagaggatatctccttctgtcattgttccgacatattcccctgccttattcagcattggaattgatgcatatttatgaaattccattgtttccaaaacctgacgtaatgtactgtaatcataaataaaagcgacctcgctcttcggtttcagaaaaaataagatattcatctcttttcagcctttcttggttttaaatctgtgtcaatacaaaaatctcatacaatgccttgatcgcatttttaaaatcatcatgacgtacaccaacgatgatattaagctcactggatccctggtcgatcatcttgacattaatgtgtgcgtgagcaagtgcagagaagattcttcctgccgtacctcttgtagacttcattccacgacccacaattgcgatcagtgcaagatcggactcaagttcaatgtgatctggatctacagctttgtgaatacctgcaagaatctgctgttctttttcttcaaacgcatccttgtggacaaaaattgtcattgtgtcaattccagatggcatatgctcgatagaaacaccattatcttcaaatacctgaagtactttacgacagaaaccaacttctgagttcatcatcgctttttcaattgtgatcgcagcgaatccatctgttccggcgattcctgtaattgtgtacttcggctgacagcatgttgcttctacgataagtgttcctttgtcctccggagcatttgtattacggatattgatcgggattcctgctcttcttaccgggaagattgcatcttcatgaaggacacttgcgcccatgtaagaaagctcacgaagctctttatatgtaattgtctcaattgattttgatccttttacgattcttggatctgcaatcaggaatcctgatacatcagtccagttctcataaagatctgcattgactgcacgagctacaagagaacctgtgatatcagaaccacctcttgaaaatgtaactacacgtccttcctctgttgctccgtagaatcccgggataacagcattcttagccttttcaagtcgtgcagacataatttcatttgtgatctcggactggaaatctccattctcgtcaaaacgaacaacctctgctgcatcaataaattcaaatccaagatatgcagccataatcttaccattcaggaattctcctctggatgctgcatagttgcttccagctttttctgcaaagttcttgcggatcacttcaaaatcctcatccagggagaacttcaaaccgagtccattaataatttcctgatatctatctttaattgctgcaagcttctctgtgaaatcttcaccgttctcagcagctgcatagcagccatagagcatatctgttacctttgtatcagctgaaaaacgctttcccggagcagacggtacaacatatcttctggattcttctgcacggataatatttccaacttttttaaactgttctgcgctcgcaagagaacttccgccgaactttactactttcttcattctcgctattcctccaatgtaattctgcgttgctgtttcgagtttcccgtgaacagtaacaatactgctttctgcattatcggttcattattatacagtgttccacagttcttgtaaacttttaaataagaaaacttataggaatttcttataaacattaataatcatcaatcaaaacgtgatctctccatattccgcccgtgcagcctttttcagatcatccggtttcaatttgatctgcattccaatcttcccgccacttacataaatgtattcctgatgctgtgcactggaatcgatcacagtcggaaattgcttcttcattccgattgccgtacagccaccacgcacataaccggtcaccgcagtaatatccttcacatggagcatttctactgatttttccccaactgacttcgcagcctttttcagatcaagttccgccgcgatcggaataacaaacacataatgtccgcctgtttttccaactgtcacaagcgtcttatatacctgttcatgcggaagaccgattttatctgctgttgtgattccatcgacaaattcatcacactcataggtttcatattcatatgggatcttgttcctgtccaagattctcattgcatttgtttttagttctttcttactcattatattagcatctcctctgttgtctctgcctgcaaatgcatctgctattccatctctcttactgcttcatgcagcggcttacgcactttctttctcgtcacctcagcaagtccaagtgctgtaatatcaactaatgttgtttggatcggatcttttgagagaaaatatcggaattcttttaataaaacttcctcgttcttctcctcatcctgatttataaaatcgatcagaataattccagacagatttcgaagacgtatctgtctggctgtttccttcgctgcttccagattcatcttcaatgtagactcatcatcaccctttttacggacgtttttcccggaatttacgtctatcacggtaagtgcctctgtcacctggatcaccagatatcctccatgtttcagccagactctttctgacaaggcatgttcaaccgctgtttctgtactataaatctttccaagtggataaccactgtcatcatggaaatggaccagttccagattctccggcatttctttcttgaaataactacaaatcttttcatagatttctttatcattcacaagaatttcttccatgccatccatatagacatttttcagatctgtaatataggacggcggagcagatttcaggcatgagaaacacactctggaagcagcatattttaaaagatgttcatattccgctttcagctgttcaatctctgtaagaacatcctcgaatgcagcatctttcgcatttgttctgataataagaccatactgatcattctgatattcctgaaggcgctccttataggcttctctgtcctttttcgcaattttggaagacacaccgattcttgtgttcccatgcgtcaaaacagcatatctgcctgtcaggctgagatttccggtcacagtcggcacctttgtctttacagcttccctgctgatctgaactaccagttcatcaccgatgcaaagtggcttcttcccaatcttatgcgtaaaaaatgcattctgtgcatctcttaaatcaaaataacaattaacgcccggctcaatctcaagaaaagcggctcctatattctgtacaatattctgcactttggcgacatatatatcgccaatctgatgcaccttttcctgttcgtcggactttgtacagtgaatctcagcaatctgatcctcttccagaaaaaaggtccacacatgattttcttttttctctatcaaaacttttcgtttcatctgtttcttctcattcctcatcgcctgtcatatcaacacccattgcctctaatggaatcagggatccatcttcactgcgatctgtatacatttccagtctgtgatgctggaatttcacgctgtccggttcaattccaaggaactgacaaaatgcttccatcacaagatccggtttcagattctctacacttcctgctgccactttcaggtaaacagaatcgcctcgcagttcccatgcatagatcaatggtttaatgtcaacttccttctcgcttcgttttgtctgctttacgattcggatctccggctgttccataaattctgaaaatcgttctttccaaccctccggaaatgctccctttctcacagatgtcagataatctgctcctgcaaggattgtcattccggtcatcttcttctcctcagcaattctacggatgcttacgatctcgattccttcaatctgacatgcttcattcatccttctcacagcatctgcactgttgacagcttccatcaattcaatatcaaaatattctccgtcacttgttagtccgattccaagcgggttagcaaatgacataatcatatgcggactatatcctcctgaaaatgcaatcggaatatccgcgcgacgcatcactttctggaagaaacgcatcacatcaagatgtccgatgaatcggagagaaccatattttctaaatttaattcttgccttcataacagacacctcctccaaatttcgctgcgccacatccggaacactgcatacggcagttcggagttactttttcttccattgcacgatcccattctctgcgcaggaactttcttgtcacaccgatatcgatgaaatcccacgggaacaattcatcttctccacgctcacgcagattgtaaaaatcaatatcaacacccgtgttctcaaatgcctgcatccaaagttcattgtggaaactctctgtccaggaatcaaacagacatcccagacgatatgcctcctcgatcgccttgctgatcttacggtcacctctggccataataccttccagaaccgtaactttcgcatcatgccagttatatttcagactcttacggtttaactgttctttaaattcatcattcacaagatgtgcacgtctcatatattcttccgccttgcacatcggagcccactggaacggtgtgaacggcttcggtacaaagaaagaagaacttgccgtgatctgacattttccatgtctctgatcttttggaatctcataatatctgcgggcaaccttttctgccagatgcgcgatttccttcatatcttcctcagtctcagtcggaagtccaagcataaagtaaagttttacctttgtccatccaccttcgaaagcttctccggctccatttaaaatcacttcttctgtcagtcccttattgatcacgtcacgcattctctgtgatccggcttccggtgcaaatgtcagactgctcttgcggatatcctgaaccttactcattacatcaagagagaaggcatcgattcgaagagacggaagagaaatattaattcccttattcttaaactcatcgatcagatatgttaccagttctttcaattcagaataatcactggaacttaatgaactaagagaaatctcctcatgaccggtattctgcaacatatcatgcgcatactgtttcaatcgctcaacatttctttctctgaccggacggtaaagcattcccgcctggcagaaacgacacccacggatacatcctctctggatctcaagaacaactctgtcctgtgttactttaataaaaggaacaaccggtttcatcggatacggtgcatctgttacatccataatgatctgttttttaactgttgccggtgcatattcattattcggtgtaaatgatttcaaagtaccatcttcattatattcagcatcgtaaaaaagcggtacatacaatccctcgatctgcgctgcacgttctaagaactcccggcggctctttcctgaacctttccattccttataagcgtcaagcagctcatcataagctgtttctccttctccgatataaaagagatcaaagaactctgcaatcggctccggattgtatgtgcacggaccaccaccaatcacaaatggatcgtctaaagttctgtcctttgcatgcagtggtatctgactcagatcaaggatctgcagaatgttcgtgtaacacatctcaaactgaattgtgattccgaggaaatcaaaatccctgatcggatcctgggactccagtgcaaaaagtggaatctgctgttctctcatcactttatccagatcatgccacggagagtagactctctcgcaccacacatcctctctgcggttgaacatatcataaagaatctgaatccccaaatgagacataccgatctcatagacatccgggaaacacatcgcaaagcgcacatcgatgtcttccacgttcttcattaccgcattcacctctccgccgatataacgggcaggtttttcaatttctaataaaatatcatcatctaatgctagttttctcatggatttctccttgtattttgtacttatgcatttatattacaaaattgtaaatgctacttttaacatcatatcttttgacgataaaaaaagcaacctattttctctttttatgtaattgttaacttgctaagcttgttacagtcatatctttcagacatgtactccggtagtcactcggtgatattttatatctttctttaaatactcggttaaatgttctctgactttcaaatccactatccagacaaatatttgtaatagaatcactcgtattttccaaacgctgacatgcatagttcagccttgcatcgttaagatattgattaaagtttctatggaatgttttggaaaagagtctggataaaacatatttgctcactcccagatcttttgccatctcttccagagaaaacttcttcttaaaatttgctgatatataggaaactgtctggtaaataagatcgttgctccccacattactcttttctaccaaatttaattttcctatgcagcgtgccaacacaatttgaagatatgcctgtgcaacagtaatatccgactgttctgtctctaaaattgcatttataaccctatatacctccggttcaaccttttccgctttgatgattgggtattcaggagccatggattgcatgatatctgcaaatttggctatcgtaaatggcgatgcaatcagataagtcgctttatttataccgggtgtcagtacctgatagtgatgaataacatctggaaatacaaagcctatatctcctttttccatatggtatagttcctgtccgacaccaagttctaatgctccacttgttacacaaacgatctccagtgcattatgaagatgtggttcaatatgttttgacttcctatttattgctatgatctcctcttttgtgtcaacatattttaattgcatgaaatactcccctttgcaacatttgtctttttcaaaatacagttcaatcactttatatatagaaaaaagcactgtctcatcgagcaatgaccagacaatgctttctcctgtcaattctaatttatatctgatgcatctgttacttcatctgtaacaattcctttttctgctttcagttttttatttgcatcttctacattcattcttgaaagtacaaacataatcaatacatcaaagattaacggaagccaaagatacataaactgcatcatatcaagtgcagactgcggctgagttgcatttgttccgatatacccactgaactcaagcagccatccaacaacagcggttccaatacctccaccgatttttacgccaagagaagtacaagagtacatcgttccgtcaattctctttccctgtgtaagataagtgtactcagagcaggatgcgataactgcattcatatctccctgccatggtccctgacctaaggctgcaagagctgtaaatgccatcatcagcggaacactgcccatatatcctgcaacaacaacaagcgctctaccgatgactgctaagacataacctcttaagttcagtttatacatacctttccacttaccaactaatgtcggtgtgaaaatcagggcaatgatcagtggaatatttactgcccatgcaaactgtccaaacaaattcttacttttcagtacccatgtcatgtaataaatgccagctccaatcatggcaccatataactgctgtaaaatatatgttccacaaatcatcatgtaatatttgtttttaacaagaagcttgaatgcctgtaccattccgtacttttcattatcattctttacttctccttcgttaagttcttcctcaggaagttccttaacagaaagtgctgaaatcgtatttacgacaagaccaatgattgcatagataatagcaaccgttctccatgctgcagcatctccaccacatttatctacaaatccaactgtaattgcctgaatcagaagacttgttgaaaacgcaaaaataaaacggtaagatcccatctgcacacgctctttgctgttctttgtaatcagtgacgtaagtgctgaataagcaatattgtttgctgtataaaacacaccatttaacagtgtgtaagagataaagaaccatgtatatttagccgttgttcccaagctgactggtactgcaaaacagcagatcagcgtaatggcacaaccaatatatccatatagcatccagggtttcgcttttcccattttactgtgtgttttgtcaatcattgatccaaaaaatatatccgtaaaaccatcaaatagttttgatacggcaatcagggtacctacgacacctgcagcaagtcctactgagtccgtcaaatagaccatcataaaagatgtcaggaacgcatagactacattacctgcaatatcgcctgatccatatccaattttgttataccatttcaaatactttttttcttccatcgaatttctttgctcctcatcttcatcgcacttattttgtctgattgctctgtatatccggactttacattacaatcagactctctttccttgtttacgggttacatgaaactttattatccctttacatacggtatcagtgtaaactgaaaccggaataatacatcatcaaatcggtactgctccaatacaactggaccacaactattagaaccaataccatttaatgcgtagtcaacacagaatactatactatctgattctattaattcataattatgcgttttctcctcaagttcttcctgcgtataataagaagcattgaatgagaaggcattttccgcagagaccacaattccatatcggctgttgttaagctctacatattcacaatcataatggcttccattttcctgtgggcgaatataatcctcatgcaaatcatctacatttgcctgatacaaaccgtggctcgcagcctgatgtttatcacaataactttcctgtggtcccattccaaagtatcttacagctgaaagttttttatccaggaacatcctcacaccaaatctcggaagatccgggaattcatcgtcttttgttactgcaatatctgcatcaatctttccagcagcttctattttccatgtaatcgtcacatcaagtatcttctgtactgtctctgccacaacggatgcatggcttgtaattttcacaccatgctttccctgcacgacctctgtcgtataagctcttgtataggctttatcataatgggctttcttccattcagacttgatgtacatatcattatctgttggtgccctccagatatttaattccatcgggtggttcagatattcccgacctgcaaatttcatctctgtaaaaagtgcagtacgtttgtctatggtataagcaaattcacgccccttgatatgaatctgtgtatcattttcatttacctgtaattcagagtccactactgtttttggtatccatttctctgcaagtttacattttgtatcctctttacttacctcaatttcatcaaatccaagaatatggtcttcatccaacagtggcaattcttttttcagatggtaaataagttttaaataacattttccattctctggaacattgatcttcaggtttatttttccttccccgtgtggtgccacagaaaactccggtagtatgcctttgctgatcacaagaccatcctgtgtcagctcataactaatcttcacataatctttcaagtcatcaaaatccatgtagttatgaagcaccagttctccgctttctttgttataggaaataactcttgccgggcgataaacattcttgtattccaaaagtcctgtatgtaccgttctgtccggatatactaatccatccatacagaagttgccatcatgaatttcttcgccatggtcgcccccataagcatatatagcctttccattctcagcagttccatgagcaatcgcatggtcacaccattcccatacaaagccgccgcacattttatcattatcctgaatcatctggaagtaatcttcaaaatctccaggtccgtttcccatgctgtgacagtactctaccaaaaggaagggtttgcttccatctttatccagatattcctgaatttcagaaagcgctgggtacatccggctgtacacatccaaattgctgtaatcatatgtttcatcataattacgatatcttgcactctcatattgtgtgatacggtctggatcaaaattctttgtccattccagtgctttttcaaagttgcagccataagcactctcatttcccattgaccacataacaatacagaaacggtttttgtcacgttccaccatgagttttacgcgatcaacgattgcctcttcccataccggatcatctgcaatcttctcattccatcgtttgaaccgattgtaatcggtgtcttcttttctgtagatcataaatggaccatgagcttcaatatctgcttcatctattaccatgaatccatacttgtcacacatttcatagaaaaatggtgcgttcggatagtggctggaacgaatcgcattaaaattatgctgcttcattaacgtaagatcggttgtaatctgttccgaattgattgtaaatccagtaaccggatcagaatcatgtcgattgacaccacggaatttaattttctgtccatttaaataaataacctggtctttaatctctatctttcttaatgcaatgtgatctacaattacttcattctctgtttcaagaatcagtttatatagatatggattttctgtattccaaagttccggacttgcgatttctaatacagctgttccttcttcagcaatacttcctagtgctacaactgctccgtttctatcttcaatcgaaatttttacatttaacggagagtagaatttcatttcaatttctactttcgcaagcatatcctcaattcttgttttaatatgataatcactgattgcctgttttgggcgtttcaaaatgtacacatcccggaaaataccactcatacggaatttgtcctgatcttccaaataggaaccatcacaccacttcatgaccagaaccgctatgctgttctctccgtcccgaaggaggtcggtgatatcaaactcactggtcatatgagaaacctggctataccctacataagagccattgatccatacataaaagcaactgtctactccttcaaaattcaagaaagcttttggtgcattttcatctttgtgataaacaaaggtatgtacatatgttccacatggaatatcctgtggtacatacggtggatcaaatgggaacggatacctgatgtttgtatactgatgtgtgtcatatcctgccatctgccatacactcggaacctgaatctcatcaaaattttctgtatcataatctttctcaaagaagggttcctgaacatcatagatactgttaaaatactggaacttccaagttccgttcaataactgcattcggtctgactcttccctatgctccaccaggttatccattcttttggatgccggaataaaataggctctggctggcattgtattttcatgcagtacgcttaaatcctcataataacgtggtacaatcataaataactctcctttaatacatatacatttttttgcactttgtttttccacagcaaaccttgtcttttacttttatgtttacgcttctctgttttgctatatatatcttatcctaatctgcaaaacatgtctatgaattggattagacaaaatatgcactaaatgatacaataacaaaaaaaaggaaaagaggtgctaccatatgtatatgaataccggttatttaaaccactctcatatggatttcaaagacaaaagtcgcccactggttgtaggaagttgcggtacttaccgcctttccagccatccaaagttaccaacctaccgtccaaggggacgcctggattatcagattatctatatcactgctggttgtgggcattttcattttgacaatgtggataacgaaacgattgtccccgccggtaatattgtactgtacagaccgaaggaacttcagaaatatgaatattatggaaaagataagacagaagtatactggattcattttacaggcgacaatgtaaaaaatatcctacggcaatatggattcccggataaagagcgtatatttcaggtcgggacctctatggaatacgaacagattttcaagcgtattatcatcgagcttcagcgttgccaagataattatgaggaaatgcttgtccttctgctccgtcatcttcttatcatctttcatcgggaactgaccagggaacatatctcgaaaaatgaatacctggatcacgagatggataacgcagttacctttttcagtgaaaattataaccagaatattagcatagatgattatgctgcctcacgtggaatgagtgtcagctggtttatccgaaacttcaaaaaatacacaggttctacaccaatgcagtttattgtgggaatccgaattaacaatgcccagatgttacttgaaacaacaacctattccatcaatgaaatttctaaaatcgtcggctatgataatcagctttatttcagccggcttttccacaagctgaaaggatattccccaagagagtaccgaaagataagaaacaagttctaaaatccacaatatcataaatccctaactggctgttaatagttacgattgatctatattatgatcaggcaatgcctgttgtaatgattaaatcgggctttccccgatgtggtatgcttcaactacctcctttcaagatgcaagcagaaaaaaagcaccttaaccatattggctaaagtgcttgtatttgtttgctattaaattgttgtgagtcagacaaacttgaatctgtctatttcatcctatctatcatattctttattttcagttctatctgattaattactttgatgaaatcttcgtctgattttcctgtcggatcatccaatccccagttatcatcaaatggtcttccaatgaacgggcatccaacattacatcccatagaaatagcaatatctggctctggtatatccgaaatcagctttgaatactgttctttctccatatcaatgccatacatttctttcataatacgaactgcatcctgatttatttgtggcttcgtttccgttccagcagaataactttcaaatacgtcggatgcaaaatgctttcccaatgcttctgcaacctgacttctgcatgaattatggacacaaatgaacgctactttcttcatacctatcccctaactttctttaatgcttttatcacatcatccttacttaatactttccccattgagactactttattatcaataaccagagcaggtgtactcataactcccattgccgcaatctgaccaaaatctgtaacatggtcaatctcatccgtcatgccaagctcactaagcgcttccttcacattcttctccaatgcattgcatttatcacaaccgccaccaagaactttcacatttgctcctgatgaaagagtttcctttgctgcctcaacgctttcttcattgcaatttccaccacagcaacaacctgattgttccttaaccatttccttttcgtcctttttctttccaaataagctcataatttcaatctccttttttctttttctaaaccagtggatactgaattgcattaaagaaatatccaacaataattattccaactgcacatattacaataaaaattcctagtaacttcggtttcactgcctttctaagcataatcattgacggtaacgaaagtgtagtcacacccatcataaaacttaagattgttccaagctgtgccccttttgcaagtaatgcttctgctactggtatcgtaccaaaaatatctgcatacataggaatgccgaccaacgttgccagaattacaccaaatggattatcactgccaagaatcttttctacccagctctctggaatccaattgtgaataacagctcctattccgacaccaatcaaaatatatggaaatactttcttaaaggtgtctataacctgttgttttgcaaaagaaagtctttctttttgcgttggttcatccatatcaatatcgaccgcattcgcttttcgaataaacgcttccacttcattctccaaatgaagcttttcaataattgttccacctattaccgcaataacaagccctacaatcacatatatgatagcaacttttgatccaaagatactcatcagcaaaaccagacttcctaaatctaccattggagaagaaatcagaaaggaaaatgtcacacctaatgaaagtcctgcactggtaaatccaataaacagtggaatggacgagcaagaacagaatggtgtcaccgtaccaagtaatgctgcaatacagtttgcccagattccatgaaaacgccccataatcttcttacttcgttctggtggaaagtagctttgaatataggaaatcataaaaatcaggatacaaagcaatatcgttatcttcaaaacatcatataggaaaaactgtacacttccacccattctacttgaagtatccaagccaattttctcaagaagatttccaattaatgtactcatccatttcattcccaaaatctgattttgaataaactcccaaatcattattgacagcacccacttttctctttacagcaggataatccttcaataaaagttttaaagccattcaaggtctcacaattcaatgaataatgatgccatctaccttctttccaatcattcaccagcccacattcatttaagattttcatatgatgagaaagtgtaggctgtgtaatctcaaaagcctccaatagtttacaaccacatttttctccgtcggagagcatttggacaatctgcaatctattactatctcccaatgctttacaaataagtgctacatctattgtattcatattgtcctcctttacatagataattgtctatgtttctattatgcattatgcatagatgattgtcaatgtttatttttatggtctacaaaattcccatcaccctttattagaagtgtatgctcatgatttcaggaacaacaagagccaaaagaaaacacctgccgcttctgacagatgttccactataaactatctatttttcatcaagacaaacaccgagtttctcaaaaactaattctccaaactggaatttggaacgtgctttataaattttttccgatcccctcaagttcgttcatggaatccttgtttttttcaagttcatctctagctgttgcgtaatatgattttttgaaaagcatatcccatgaaagatattttgccatacagtcaaactgcttatcaatcagctcatactggatactgtctacgggagaaccgcctacaacaatcgtgccaacttttttattttttaactgcaatccacggcagtagcacttatcaatgataagtttcaattgtgctgacattccccaccaataaactggtgtagcaaaaagaatcatatctgcggcagcaattttatcaattgtaggatttgtatcatccttatcgacgcatcccttagagcattgacagataccacatcccttgcatggtgcaatgttgagtttgtcaggttcaatgatttcaatttcattcttttctgatgctccttttataaatgcattgattgctgtcagcgtgtttccttttctggcacttccattaatgattacaattttcatgcgtgtatcctccaacttccgatttgtaaaacacattcttttttacataggcacagtataccacatttcctgttcctatactatatcatttaatgcttcttccgatatgaactcatcctctccacagaaacctccggctggctcatatttcaggtcataaaaaacggaactatgtcattacagttccgcttttttataacctgattgcattatgctctatgattctcactcattctctattggttatattataaccccgttcactctcccaataatacgcatcttcataatacttttacaaactccactgcgttttttatatcttcttcatctggatgccctttggcaatacaacccaccaatttaaatggaccaaatgtgtcatagcccttgcatccgaattttcctatcactttagaacgcttcttgtccaaaatctgctctatggatttgtaattcgcacttccaccataagtacagatcagaaatacctttttatcgtccggtagattcttctctgcaaattccaatatcgactgatgaaattttgaaaaatagattcctgatgcaaacccaattatatcataactattcagatctgcatctggctgttttacagcatcaatcaaatcaacttggcactcttctgctatgttttttactaatttttctgtatttccatgatgtacagatgcatatacgattgcttttctcatttattttcctttctgcctactccatcaccacaaatcgtattgtttcatagtctctgcatttcgatattcatgtttctcataatatcctatcaactttccctcatctctgagtgccaccatataaacatccttattctgtttctcattgtgaaaagtataaacgatattatggctttcatctactgcaaaccagtccactacctgctgtattttatcttttgattccggattatgacaatctaacagacttcttccaataagtttatcgccgcctcgcttcgcatagctgataacagctgccggattcatgtaaataatctcatgtttaagattgcatataacaacggatgccctgtcctgatcaacaatactcttataaaaactgaccgcatctatctttttatatatttttttcttcttacttttctccattttatgttgtccttaaaacttcactacttccggttcatgtgtaaatgatgaaaatgtagctgtcacatttttaaaatagaatacttctgtatttccatcatctgccgagtacatattctgtaaagatggataagcatcaagcatagactgtcttgcttctcttctgtcatcttctacaagttctccggctacacgaagccactctccatttttaaatgcacagatttctacctttgggtttgcgtgaatctgttttgaaacatccttcacctttccggtctgaatatacagttttccttcaaaaacatgcgctgttccaaaaggtctaactcttggctggtctccttccactgttgccaaataatatgtctctgcttcttttaaaaaatttactactcgttccatggtataagcctcctgttattaaaatctatcaataatagaattataccattccatcgtttcttatgcactgatcaaccgtatcataaaacccctgtttcacatcattccagacgtaaaccaggggtttcacttatatcattctatgtctcagacaatacatatactatctattcacttttactccgtctcataaaagactttcttatccagagctttattctgatgtgcaacgattgttgtacatacagcatcacctgtgatattaacagctgttcttgtcatatcaaggatacggtcaatacccatgatcagaccgattgcctcaaccggaagtccaacagagttaaataccattgtcagtgtaaccagaccaacacttggtactccggctgttccgacagatgccagtgttgctgttccgataacggtaatatagtctgccatactcagatggattccaaacgcctgtgctgcgaacacaactgcaacaccctgcatgatggaagtaccatccatgttgattgttgctccaagcggaatcgtaaaggaagaaatcttcttggaaactccgactttcttagtaagtgtttcaatagaaagcgggattgtcgcatttgatgtcgctgtagagaatgcaaatgccataaccgggaagaatttcttgatgaagcggatcgggttcagtcctgtgaaaatctttaacagaatctgatatactcccagacactggatcgcaagtgccaaaagtactgcgatcatgtattttgccagcggaacaaatgcactgaatccgattgtagcaaaagtacggctgatcaggcagaatacaccgattggtgcaaggctcatgatcatcattgtcatttccatcataatgtcattgaactggctgaagaagtttgcaactgtctctgcacgttcacccatcttcgcaaggataacaccaatgatcagcgcaaatacgataacctgaagcattgttccacttgccagggaattgatcgggttgtccggaatgatatttaggattgtatctgtcagggaagttgcttccattgtctcaactgtggacgcacttgtcttgattgcactcatatcaagtccgatacccggattgatcagattaccaactgataaagcaactgttacagcaagagctgttgttgcgaggtagaataccaatgttctgacacctactgttccgagcttcttcgtatctccgattgccatacttccgcacacaagggaacaaaatacaagcggtacaacaagcatcttcatcagacggatgaatccctgtccgatcacatagaggattccttctacaataatatcattttttaccttgctgtctggaatcagataacaaagtacaattccaaaaacagcacctaaaagcagagcaatgaaaatcttggtcgtcagaccaattttcttctctttcttttcatctttcacattcttatttttcattctaattctccgttctttctttcatatactcttctaatgactctttccaatccggcatatcatacatatcaataatacggagaatgaagttgtccaataccgcatacggtggtctgacagaagaaaggtctgactgttctgtcggaactgcctttaattcaacgtttttccctgacaatctcaagatctcctgagcaaattcgtaacgattgcagactccactgcaagttacatgataagtaccgtattcattcgtactgatcagatacaggatcattcttgcgagatctttggcacttgtcggggaaccaaactgatctcctgctacagaaagtgtttttccctgttctgccacttcgagcacacggttaacaaagttatttccgccttttccataaacccagttactgcggataatgaaatgcttgtgtgtgaattctttcacataattctcaccagctcttttggatgctccataaacagtcagtggattcgtatcatcaaattctgtatatggtttcttgctctgtccgtcaaatacgtcatctgttgaaagctggacgatctttgcaccattctttcttgcgacgatacttaagtttcttgctccaagtgcatttacccggtaagcatgttccggttctttttcgcacagatcggtgtctgtaacaccgcagcagttgataatcacatccggacggttcacaataccgaagttaagaacttcctctgtgtttgtaatatccagatcatccacatccgtattcagcacttcgatctctaatggatccagaatgtcgttcagcgctcggccgatctggccgtttgagccggctatccatactttaatcatctctcatttcctccttctcatgcaatgaaaaaggcgctgaatccaatcaacgcctctcatatactataaaataaacgtcaataatattttatcaacctactgtttccgtgtcaagattacacttttagtctatcaagaaaatatcatggttttcctgaatcttctctataatctcatggctgcttatcccttgaagttctacactgttctgactgacataaagaaacacaagaaacagaaaagtggacaggatcaatctggtagtaaagcttcctctgctattttctttcttatccagatcttctgctccatttcctgcactttgctccagaccatccggatataattcccgatataaacgaccatatcttggatgaattgccggtgttatcataccggtattccgctgtcgtctgcgattttcttcccacaatctacgcctacggacttctgattctttttcctgcacgaaagatcctctccatcttctttttttctagtttatgaaagtttcttctgctttattcttccaggaaaatctgatacagcgttttctaccggtcagccagttctcctgtaatgtcttcccaggtaatccctttttctaccatgagaaccattgcatgataaaggaaatcagataattcatacttcacttcctcgacatttggattttttgcagcgatcacaacttctgtcgcctcttctccaacctttttcaggatcttatccagacctttttcaaaaagatagttcgtataggaaccttcttttggattctcttttctatccgcaattgtctgatatacggattcaaaaatctgaaccggattcttggcatcgtaatcatttccaacaattgttgtatagaaacaggagcggtttcccgtatggcatgctgctccgatctgttctacctttgcaagcatcgtatctctgtcacagtcgattgcaagagatttcacatactggaaatgcccggatgtctcacctttgatccactggcattttctgcttctgctatagtaagtcatgcgcccggttttcacagtatgctcaaatgcttcctcgttcatatatgccatcattaagacttcatttgtcttataatcctgaacaatcactggaattaatccgtctgaattcaatttaaactcaccgaaatccatctggctttcaaaggaagtcatttgaattccattttctgcacaaacttctttaaatttgttaaagtccatatccagacgactgatgaatcttcctgatacaccttttacaccattactctttaaaatattaaggatctcgttttcatccatcgtatccgtgacaacaacacactgcgtttctgtaacatttacaacagaattcagatccaggcgatgcataaatatcatctctgtactatatgcttcgatcagatgctgctgtttaaacaatgcatcgaaatcatttaacgatacagcgattctctcttttccaaaacgcttggatacttcttcgatcaactcaatagacaatgccttagaaaagttcagcattgcacgttttgctccggcataaagaattttcttcacatcctctgcacggcgaatatttcctccgacaaccatcggaatgctgatcgcacgattaatctgtttgaggagattgatcgtctcatcatgttcttcatctgagtctgacagatcgaaaataatcagttcatccgctcctctttcattgtagtggcgtgcaagttccatcacatcatctgcgatcacagttctgtcatcgaaccactgcaccgctttccctctttctataaaaatacaaggggtcagtcttttatacataattccttcttactccttctgtcacgccgttaaaggcttccctttgtagaccatacttcttttattcttggctcttctgataccgccatatccagagcctttccgaatgctttaaataaagcctctgccatatgatgattattccctgcatcaaggatcttaaggtgcaggttcattgcagcactataggaaactgcatagaaaaattcacgcaccatctctgtatccattgttccgagtaccggtaccgtaaaatctgcctggaagttcagatacggtctgccggaaaggtcaactgctccaagagcaagaacctcatccattggcaggacaaaatatccgtatcgcttaattccggccttatctccaagtgcctgtgcgattgcctgtcccagtacgattcctgtatcttcaatcgtgtgatgggaatccacttcaagatccccacgcaccttaacatttaaatcaaataatccatgtcttgcaaatccatccagcatatgatcaaaaaacggaattcctgtatcaatctgattctttccctgtccatctagattgattgtcagttcaatatctgtctcttttgtctttcttttgcagcttccgattctgttctgcattacactcacagctccttttctcttatttttcaaatcttactttgattgaatttgcatgtgctgtcagatgttctgcctctgcaaatttctcgatatctgtgtggatcttctcaagtgcatttcttgagtaagagataatgcttgattttttaataaaatcatctacagatagaggtgagaagaattttgctgttccgtttgtcggaaggacatggttcggtcctgcaaaataatctccgagcggctcactggaatattctccgatgaagatagctccggcattacggatctttgtcatcacctcaaacggattcgctgtcacgatctcaagatgttcggaagcaatagaatttgctgcatcgattgcatcctccattgtctctgcaacgagaatatgtccataattatccagggatttctgaatgatctcacctctggaaagctcttttacaaacgcatctgtctgtgcagatactttctctgcaagctccatacttgttgtaacaagaattgctgatgccatctcatcatgctctgcctgagacagaaggtctgctgccacaaaacgtggatttgctgtttcatcggcaagaacaaggatctcgcttggtcctgcgattgagtcaatgctaacaaatccataaaccgctttcttggcaagggctacatagatatttccaggtcccacgatcttatctaccttcggaatagactctgttccatatgcaagtgctgcaattgcctgagctccaccaaccttgtaaactttatctgcaccggcctcttttgccgcaaccagtgttgtcggagtcacctttccatcttttcctggaggtgttaccatgatgatctcatctacacctgcaaccttcgccggcatgatattcataagtacagaagatgggtaagctgcttttccgccaggaacataaacaccgactctctggagtgctgtcactttctgtccaagaattgttccgtccggtttactgtcaaaccagctgtactgcatctgtttctggtgatagtctctgatattcaccagtgcttttctgataatagcgatcagttcatcatctacctgctcatatgcttctgcaatctcttcttccgttacaagaagatgctctgcgtccagtctgactccatcaaatttctctgtatattcaaatacagcctcgtctcccttttctttcaccgcattcaatattttctgaacacttgcttcaaacttcccatagttattcgggcttctctttaaaaggtcatccagaagattcttcttcgtattctcattcagtttctctatacgcatttgtctattcctccctcagaagatttcttaaatttgtgatcagctctttgattctgtcattttccattcgcatgctgaccggattgacgatcattcgcgctgacagcgggcacacttcttcaagtacgaccagtccgttttctttcaatgtagaaccggtttctacgatatctacgatgacttcagataagccaacaatcggtgcaagttcgatcgaaccgtttaatttcacaatttctactgtctgatgtttcttgttgtagaaataatctttcgcgatattcggatatttcgttgccacacggatcagttcatgatgtttcagtttttctgctgcctcttcatatccacacacacacatcctgcattttccgaatccaagatccaggacttcatggactttgcgtccctcttcgataattgtatcttttccgacaactccaatatctgctgctccgtactctacataagtcggcacatccggtccttttgcgagaaagaatttcaatcccagttcttcatttacaaaaatcagctttctggaatccttatctttcatttcctcgcatgtgattccaagacgctccagcatctccagtgtcttctttgcaagtcttccctttgtaagggcaaatgttaaatatctcattgatctgctcctttattgctgctttgttttcttttttgtattgaccagcttctcttctcctgtctgaagattgatcacttcaatcttccggtcctctcttaagtaaagcatacttgcaacagaagaacgctttccatacgcttcaaaagtctctctttcatcccaggagtttctcttcatcatctcgacattttttccttttgcacgaaatgacctcgcaagagaaattgcccactgttccgttgcatccgtataaacaagcagattgcggtgtcctgtctctactttgatcttctgacgatccagtgcactcataagttcatccagaatgattgcgaatccgatcgacggtgtcttctttccaaacttctcaagaaggtggtcgtaacgtcctccacgtacaaccgcatctccggtaccataagtataggcacggaaaatgattcctgtataatatccataacttccgctcatgctcagatcaaaagttacatgatcctctactccgtaaatcttcagcagatcataaatctggcgaagacgttctaccgcaagtcttgctgcttcacccggagcaatgcgtcctgcatctgcaaggatctccggtccacctgtcagttccggaagctgatggaacgcttctttcacctgatcggcaatctcataatgatcgagaatctcttccacaccaaagaagtttctgttcgcaatcaatgtacggatctcttctttttgttcatcttccagattcgttgcctcgaaaagactctgaataaaatcaacatgtccgatacttacctggaattcctttagtccggttttcttaagtccgtccacaaccattgcgagcatttctgcatctgcctcgatagaatccacactgatcagctctgcaccaagctgtgtattttctttcaggcgtccacgataactggaatgattgataaatgtatttccggcataacacagacgaattggaaaattctctgtctcaaacagtgttgccactgctcttgcaatggacggtgtaatatccgggcgcaacgccagaatattcccctctctatcaaagaatttataaagatctctaattgatgtcgaaccgatttccttgcggaatacatcaaaatattcaaatgtcggtgtctgtatgtcctgatatccatataaatgcaatacagtattcagctttttctgcaatgccagcttaatggcacattctctattataaatatcccgaacgccttccggggtatgtaacttctgctccatgtctcgttcaccttcctgtcttttcttggtttttcactttagtgtgctaccacgttaaaacctgtttgtaattatacggactttgtaggattctgtcaatccctcgtttccaaatctttctgaattaaatccagatacggcacaaaatagccatttttcagttgaaaaaaccattcaggatctaattcttccagccggacactcttgcgtcccccactctgcgcgcggtcccagaacttacggatctgtgtatactgcatgtaataaagctcatttcttgctgtataatagatcagaaaaaaagcaatcccgccctgccgttcaaacttttccataaagtccatctgatgctcatgtacattctgaagtgggaaggtatctacattacactcttttgcatcaaaacagaccgggattccctgcactgctccgatatagtctaccgtacttgctttgtcgaaatacgcaagtgtgatctgtctgtggtctttatccatacgtaccggagtgatcggtgtcgggattttctgcatcagtgcaagtcccatctcactgtatctttcattcgaatgattgataaattcctccagtgtcgaacctctaagtcctctcgagttccatgttgccatctcacatcactccctgtgctttacagatttgttcaaataaggccgggacagatgctttgatgatctttcctgaaagctgtttgatatctccttcgcagttctccgggaattccagacggtaagcatgcagaagctgggaacgaagtccgtatttctttttcaaagcatcgttaaatgaccggttcccatatttgtaatcccctgcgatcggatgcccaatggatgccagatgtgcacggatctggtgtgtcttaccggtgatcagatgcacttcaagaagtgttgtttctctatttcgtgcaagcactttgtattcggtatcgatcgctgatgcttctttccactcttttgtctgttcagccggctttttctgactcaccgtaactttatttgtcttttcattcttgacgagataaccatgaatcctctgattctcttttacctgcccttttaccaggcaaagataatatttcttaagtgtacggtcacggaacatctcgcttaatccctgtaatgcctgcagtgtttttcctgctgccacgattccgcttgtatttctgtctaaacggttacagacagatggatgaaatgtatgcagttcttcttccgtgattttcccattttccaacagataatcaataaaatactccacaagagaagtatccgtcggggatgccttctgggagagcattccgaccggtttattgataaatacagcagcctcatcttcatataagatatctaactgtaccttctttcccgctgtctgttttcttgcagaggacgcttttttcttcgaaaactgtgaatgatcgataaagttctcaatcgtctcttccgcaagaaataacttaatcacatccccctgtttcagctgttcatttccaactgctttttttccattcagggtaatattcttttttctcatcatcttatagaaaaaactttttggcgctttattgagatactttgcaaggaatttatccatgcgctgtcctgcctcatttttctggatgctgatctctctcatcgtcttttcctctttacattgatatattcagaataagattacggatttcctgttctcttgctttcgtatcttcctgctctactacagcaatattttcaagtccctccacgcgggccagaaacggtgtatactgatttaagatcttaacagtaaaacctgtgtactgattctgcgcaaggattgtcttgatatgctttccaagttcatctgtatttactttctcataatgtgtgtatccgtaaatgttgtgtcccgaaattacgatacagtctgttggcatgatatgctctttgcttgtaattataagatcataacaaactgttaaatgttttgattttcctgcgatttccttcgcctgtgacagttcaattgattgatatggataacgtgcgatcacacctacaagtgcctttgatgccggaagacatccaaggatagcaacaactgtcagaagattcagcctcgtatgtgtctgccagtaaccaagagcaaaaattgccagaacgattgcaaaataaataaccgttcttaaaatctccacttttcttttataattcaaataacctggttttcctttttgtattttcttcatttttcatcctattctaaattcatatttgctgcatacgcacgagaaatccatgcggcagcagttttgttccaaagtaagttaatttcattgggattccataaacggagactgatttcccggatctgcagtccttcaacgcctgatgaaccactctgtctgccttcgccattgtcagttccttcaagatattctgcggtttcccggaaaacttgaaaaactctgtatcaaccggacccgggcagactgctgtgacgacaattcctttttttctcaattcttctcccaatgatctggagaagcttaagacataggacttcgttgccgcatatactgagaaatacggttgtgggcaaaatgcagatgcggacgcaagattgacgatcctgctgccagcacgcagaaatggcagacacagcaatgtcattcttgtaagagaccggcagtttacatccaccatatctgtctggatccggaatttttcagacaaaatctcttctacacttcctgacttgccaaatcctgctgaattcacaagcattcgtaaatccggctgttctttctcaagtgcatctctcaattccttatatacctttttcttctgaaggtcacctgcaaaaatccgaagaggaactctgctttctttcacaagcgcttccagacgctctttgcgcctggcaatcacccagatctcatccagatttttataaaaatatccaagctgacgtacaaattctcttcccattcccgaagatgctccggttacgattgcaattttcatcctgcttcctttcttgaatcctgtctgtcagatacttaaatgtacctattttctattcttcttagaatgaacatttctgatagatttcttcttatttttcccttcaactcttcctctgtgttcagaattgttttgtcttttctgaccattcgaaccttttgatccttttttcggttcctttctgccggcttttttatcatttcctgaaccacgcatctgtctcggtctcacaagacatttcggtccgaatccgatcagatcagatcttcctgctttatgaagtgcttcaatcaccagatcatacagctctggattacgatattggatcaacgctctctgcattgccttctcatgcggactcttcggaacataaaccttctgcatcgttctcggatctaccccggtataatacatacaggtggaaagagttgatggtgtcggatagaaatcctgcacctgctccggcatatagccaagatcacgacagtactctgcaagttctaccgcttccttcagagtagaaccagggtgggaggacatcagatacggaaccagatactgttctttcccgattttctcattcatcttataaaactgtcttgtaaactcttcatagactttgtgctccggttttcccatcagagacaggacaggccctgccacatgctccggtgctaccttcaactgtccactgacatgatattcacacaactctcttaaaaactcctgcttcttatctgcgagcagataatcaaagcggattcctgaacggataaacaccttcttaacttttggattatctctcaactttctcaacagactgacataatctctgtgatctgcgtccagattcttacacggagacgggaacagacactgacgcgttttacaaacgccatgctccatctgctttttgcaggatggatgccggaaatttgctgtcggaccgccaacatcatgaatatatcctttaaagtccttatcttttgtaatttcttttgcttcttcaatcagagactcatgacttcttacctggacaattcttccctgatggaacgtcaatgcgcaaaaactgcatcctccaaaacatcctctgttgctgatcagactgaatttaatctccttgattgcaggaactccgccttttgcctcgtaagacggatggtaagtcctctgataaggaagggagtaaacatcatccatctccatctgtgtcagtggtgctgccggtggattctgtactacatacagatgttcagaatacggttctacaagacgttttccgttaaatgcatccgtattcagatactgtgtgtaaaagctgcgggcataattcatcttgtccgctttaaggtcttcaaaggacggaaggatttccgcatcataaatactgtctaatgattttgcttttacaaccgtaccggctatatacgtgatatcctcaaccggtatcccggcatccagtgcttctgcaagctctatgatcgaatgttctcccattccataagaaatcacatctgcacccgaatcgagcagtacagaacgtttcagcttgtctgaccagtaatcatagtgtgccattcttcgaagacttgcttcgataccgcccaaaatgatcggtgtctttttataagtctgacgaatcagatttccatatactacacaggcatagtccggtcgttttcccatctcgccgcccggtgtataggcgtctgtctttcttctctttttggatacagaataatgatttaccatagaatccatatttcctgcagagacaagaaatccaagtcttggttctccgaacacctgcacgctctccggcttacgccagtccggctgtgcaatgatcccaacacgatatcctctggattccagaagacgtgtaatgattgcgtgaccaaaagatggatgatcgacataggcatcccctgatatatagacaaaatctacctgatcccatcccctctctttcatctcttctctggtaattggtaaaaaatttcctttcatgctttctccctgtttaacgtaataatgaacagtcacgcaatgcttccagttcctgtcctgttagtttccgatattctcctaacgcaagccgcggatcaagtacaaggcttcccatctgcaggcgtttcagataaataacctcttttccgactgcatggaacattcgtttcacctgatgaaactttccctctctgattgtcagtcggatttcagaaatctcttctcttttcagaatttccagatgagccggaagtgtcggtttctcttccccgatttcaagtccttctgcaaatcttctcacatcttcttccgtaacttttccatcgattctggcgaaatagactttatctacatgcttcttcggtgacaaaagctgatgtgcgagttcgccatcatttgtgatcagtaaaagtccctctgtatctttatctaatcttccgacaggaaagagatcctttctctgcttttcatcaatcaaatctaatacagtactgtcatttttatcttctgttgcagaaaccaccccggctggcttatttaacatgtaatattcatattctgcataagcaaccatctgtccctggtaaaacacatgatctttttcggtgtcaatcttgatctccggacgttttaccgtctcttcattcactcgaacctgtccttttgtaattgctttcttcacttctgtacgtgttccgattcccatgtctgccagatatttatccagtctcagtttcatgagttccaccgccatcccggaaggtacttattcttaagcatctgattcacaagctttccaaaaccaagcggatatccatccacacagatcagataccatcccttgtctttcggcttcacaagatcctccacatccaaagtctcgcctttcagatatttcataacgcgttcgtcttctaatggaagatcgatcacctgatcatattcttcctttttcagattcatcgccagtgcctgactcggctcaaaacgattcttcttcagttcacccatcagtaggcctgttcttaagaaacggattccacgaagtgtcggaagtccttccggcatataatatactttttctccacgcagatccatgcgagaggaatcgaattttcgatcaatatgaccaagaaattcttccaattcttccggaagcttcttgttcttcccactctccggaagtctctttccttcttcctgtttttcacccttttgaagaagtgcgaggaaatgtccttctcccttcatacgatgagggaaaatacgaaccgtcttttcaagttccggattcttgctttctgtcacctgcggcattccatctgcaaatccttcgtaaccttccatctcacagatcttaaattccgggtattcctgaagcagatattcaatcgtctgttcattctcttccggtgaaaatgtacaggtggaataaagcagcattccacccgggcgcagcatctgggctgcctgtgtcacaatgcttctctggatctttgaaaaaaactccggtccgtgttcttcccatgctttcaccatctttttctctttacggaacatgccttccccggaacaaggtgcgtcgatcaaaatcttatcaaaatactctgggaaataagaaacaagctttccgggctcttcacttaagatgagcacgtttccgattccaaataattcaagattcttcaaaagtcccttcgctctggaactgctcagatcattcgcagccagtacaccggttcctccaagctttgccccaagttctgtggccttgcctccaggtgctgcacagacatcaagcacacggtctcccggctctaccggaagacgatctgccggtgtcatggcacttggctcctgcagataataaagtcctgcgaaataatatggatgtttcgacggctggatattatctccgtcataatagaatccattatggatccacggaaccggctctaacggccaaggtgcgatcttcaggaaatcttccacagaaatcttcgctgtgttcacgcgcagaccatagtgacgcggttcatcataacatgccgtatatgcttcatattcagaaccaagaagatccttcattttctcttcaaatacttttggtaaattcatatttattgtttgctcctttgcaatatcaagatcaaaatactttacatttaactatatcatatttccatagctccggtatagtttcttttttcttttcatagaatatttttgtaaaaggaggtttcctatgcttctggctctcatactgctttcactgttttttacgatgctactctttcctgaaactgtattccagggagcttgtgatggcctgcttctctggtatcagattctgataccgaccctttttccttatcttattgtcacaggacttttgttgaaaacagatggtgctgctattgtctcccgtctgcttttccgtcctttccatctgctctttggaacttccttctatggaagtttcgccgttctgtccggctttttatgcggttatccaatgggttcaaaaatcattgccgaccttcttcttcaaggaaaaatttctcttgaagaagcttcttacctgctgtccttctgtaataatgcaagtccatcttttattattacttttcttgttttaaatacaattcatcagaaagctttctgcattcccgctttactgcttcttttcggaactatgatcctcttaagctttcttcaacggattctaagacatttcatcaaaaataaagattggattttcccggaaatgtccgaagttttcacacaggagaattccattttttcaaaaccactgacgcacaaaatgaatttttccgtgttagaatcctgtatcctgaacagttcagaaacacttgtaaaagtcggaggttacctgatgatcttttctgtacttcttgcattattggaacttctgccgattcgttcacctagttttcttctcctgaaatcttctcttgagatgacaaacggaattcttctcctgtctcaaagtctttcccacccccaggttctttatccgttgcttctcgcacttacctcttttggtggatggtgttccgttgcccagacacaatccatgattgccggtacaggacttaaactttcttcttatataatacaaaaactgaccgccgcactggcagtcagtcttttgacatttctctatctgaaatttttataatacaatgtaatgactacctcaggtctccctgtccattctcatcataatatccgtcatcggatggaacttcaagttctgaacggttagagcggactgtatcgtagcactcctgtaaagaattgatcaatccgtcatactttgttgtataactgtccaaagtatgtccgataatgctttctgcatttgcaagaagatcatctgtatactggatcgcaccaacacgaattgtatttgcatccattgttgcgttatcaagaatctcctgtgcctgtgctgttgcctgagttacgatctcatttgcctgagcatatgcctgctgcatgatctcatgctcactgacaagctctgttgtctgaacctgtgcttcctcgatcattgcatctgcttttgcctttgcatcagcaagaatcgcatctctgttcgcaataatcttctgataacgtttgatctcatccggtgtcttcatacgaagttcgcgaagtaactcatccagatgctccttatttacaataatctttgttgtagacaacggctgaaacttacaatctctgtctatatattcttcaatttcttcaatgatctgttcaatacggctgctcattgttacactctccttttttctttcatcttttctctgagtgcgatctcgacggcttccggcacaaactgtgatacgtctcccccaaaagcggcaatctcccgcactgtagtcgaacttaagtaagaatattctatacttgttgtcagaaacatggtttctatatcaggcttcatcctctgattcgtctgcgacatctgcagctcatattcaaaatcggtaatcgcacgtaatcccctgataaccacatctgcacctatctgttccgcaaagtctaccagcaatccatcaaatggtataatctcaacattcggcagatctttcgtcacttcctttaacattttaacacgttcttctacagaaaacaacggcatttttgctttattattcagtactccgacaattaatttgtctacgattttacaagatctgcaaatgatatcataatgtccacgggtaacggggtcaaaacttcccggataaattgcttttaacatacttcttcctttccggctttctcaataaatacatgcttgtttgtcttatatctcttctctttgatcaaagaatatcccaattctggaagatatccaaaatctgtatctaacgaagcttctacgatgatcaccgtatcttcatagatcagatccgatcctgcaaggtattccagaactcttttctcaaatcccatattatacggtggatccatgaatacaaagtcaaaaaccttttcaccttccaactgatataatgcgttcatcacatcctttgtcagtgtaagtcccttcttctccagacgtgtgaatttcaaattctccttgacacattccatcgccttaggatttttctctacaaatactgcttcttttgctcccctgctgagagcctctattccgattccgccacttcctgcaaacaaatcaaggaaaatacagtcatacatctgcggacttatcatattaaacaaagtctctttgatccggtccgttgtcggtcttgtctctatcccctcaagagtcttcagttttaggcttcttgcgcttcctgcaattactctcaaatatcgacacctcctgtcattaactatggtgaattttagcagaaaaaagcacccgggtcaatgccgagtgcttttctctttttcatttcttgtgttctttttactgtacatgacagtttttgaaccgcttttctgtctgatgcagaccgcttctgcagacgatttttcttcgcctgttacttttctgccatctgcttctcctgctgttcaatcatctttttaaccatataaccgccgacagaaccattctgttttgatgtgaggtctccattgtagccgtctgttaacggaactcccaactcggatgctacttcgtacttgaacttattcatagctcctttcgcctcaggtactgctgttttgttagatgaacgacttgccatgatctttttcctccttttgcattttgtaactttactatttagctttgttacgctgttagtatgtggaggaaaattaattttaaactggtaacttctggcaatcactgatgcagccggattgctccattgctgtaatccgcaaacatcacaatgttgtttccagcatgatctcatccagttttatccgtaaatgttctttcaatttgcgatgctcagggaattccagttccggatcgtccagaagaagtctgtctgcctcttcacttgcgttttgaagcagctttgcatcttgaaatacatcggcaactttaaaatcaagcacgccactctgccggattccaaaaagatcacccgggccacgcagtcggagatcttcacttgcaataaagaaaccgtcatttgaatgattcaggatatctaaccgttccttcgtttcttttgatttcgatgctgtcatgaaaatgcaataggactgatactttccacgaccaacccttcctctcaactgatgaagctgcgccagcccgaaacgttctgcattttcgatcatgattactgtcgcattcggcacatcaattcccacttcaacaactgttgttgaaacaagcacctggatttcattttttccaaatgcattcatcacttcatctttctctttttccttcatctttccatgcagaaagctgacattgattgaatctcccaacgtttctgaaagcatctcgcaataatcgataacattttccgcttccattgcttcactttcttcaaccatcggacagatcacatagcactgacgtccttgtgctacctgttttcttatgaattcataggccttcggacggtatcctgtatccacaacacagtttttgatcggaagacggttcttcgggagctcatcgatcacggaaatatccagatcaccataaagaataattccaagtgttctcgggatcggtgtcgcactcattacgagaatgtgtggcaggtttcctttacctgcaagcatttctctttgttttactccaaaacgatgctgttcatccgtcaccacaagtgccagattatgatagattgctttctcctggatcaatgcgtgtgttcctataataattgatgattccccactctcaatccgggcataagcttctctcttttcttttgctttcatagatccggtcaaaagttctgcccgcagtgggatctgatactgttccaacatgtctttgatattttcaaaatgctgtcttgcaagtacctctgtcggtgccattaacgctccctgatagccgttcaatcctgcaaacagtaatccaagaactgctacgattgttttacctgatccaacatctccctgaacaagtctggacataacatattgacttttcatgtctttctgcatatcatcccatacccgcagctgcgcagccgtcagttcatacggcagttgtctcaggaattcgctgatttgaggctgatcttcaaaatggaatccgttcttcatcctgtcctgtgtatttttaatttggcgcagagaaagaataaaaacaagaaattcttcaaaaacgaatcgttgtcttgccgcaagaaatgcttctttattctccgggaaatgcatctcccgcacagattgttcataaggccggaaatgatatttcttcgtaaattcatccggaagaaagtcatcctgttcccgcacctgttctaatgcctgacgtagtgctttgattactgcattgtttgtcagacctgctgtcaatccataaacaggctgcatggtgttgatcttttcctgataacggactgccggatcgtaaatttccggatgttccatcacaagggaatctcttttcttcacaaccctgccgcggagaacaactgctccttttcgcccaagtgtatttctcaaaaacggcattcgaaaccagattacctttattgttcctgtcagatcctttaaatatgcagtcgtgatctgtcttccttttcctggtgaaacctgcacacgcccaaaaacactgccgcagatcgtgcagacttttccttcctccacttcactgattggaaccggttctccaaaaatctcataccctctcggataataatgaatcaggtcatccactgtgtaaactccgattttttcgaagagtttctccgttttttcgcctacacctttgattgttccaactcctgcttttttactcatttatgtctgtctcctaaacaaaataaccggaacacttttcccaaatgtcccggtctgttcctgattttaatacagtactgctgttctgtctctttactgacagttctccttattcaacagaaagtacataatagtagattggctgtccaccgaaatgtacatcaacatctacatccggatataaatcttcaatctcctgtgcaaagttctctgcactctcttcctgtacatcctgaccataatacaggctgatcagctctgtgtcttcatccaccagctgtgcaagcatctcttttgttgtctcttccacagactgtccgacagcaagaattccactgtctccgattcccatgatatctccctcatggatctctttgtcatcaatgtgtgtatcacggactgcataagtaacctgtcctgtcttcacatttccaattccttcgatcattgcttccagattcgtctgtgcgtctgcatccggcatatagttaatgatcgcagtaattccctgcggaactgtcttggaaggcacaacaataatatccttatcctctgtcagcgtctgcgcctgattggcagcaagaataatgttcttgttgttcggaaggataaaaatatgttctgcgttcacctgatcgatcgcattgagcatatcttctgtacttggattcattgtctgaccgccttcaataatgtagtcagcaccaagctcacggaaaatctcattcattccttctccgatagaaactgcaataaatccgacttctttgcgcggctccgcctttttcgcttcagcctgctgtgcagccagcttctccgcatctttgatcaatctctcctgatgctcttctctcatattatcaatcttcatacgtgagagctgtccgtatgtcagagctttctggattgcaagtcccggatcattcgtgtgcacgtgaatcttaacaatatcatcatccgctacgcatacgatagaatctccgatagactccagatatgctttgaactctgtctcatctttcgctgtgaattctttttccagcatgatgataaactctgtacaatatccgaatttaatctctgtttctgcctgttcagaaggcttcaccatctttgtgccggcacttgcctcgatcgcagaataatcaatctcttttccctggaatgcatcgtatgcaccacgcatcacttccagaagtccctgtccaccggaatctactacgcctgcttcttttaataccggaagcatctccggtgtcttttcaagaacttcctgcgcatagttgatcacttctgaaataaatgtatccagatcttctgttgtctctgcaagctctgccgctttctgggatgctccctttgctacagtaagaattgttccttccttcggcttcataacagccttataagcagttgcagttgcacgttcacatgccttcgcaagtgtaattgtgtcaatctctttatgttctctgatctcctttgtaaagccacgaagaagctgggataagataactccggagttacctcttgctccacgaagagagcctgaagaaattgcttttgcaatcgccaccatatcaggattctccagcgcctttacttcttttgccgctgacaggatcgtcagtgtcatatttgttcctgtatcaccatccggcaccggaaatacgttcaattcattaatgaactccttctttgcctcaagattcgctgctcccgcaagaaacatcttctgaagcaattcggtgtttatcgttttaacagccacaattgttcctccttaatctatcactctgacaccttcaacgaagatgttgatcttatctactttcataccagtaaattcttctaccttatattttacattattcataaggttgtcagaaactgaaagaatattcactccataggaaacgatcacatgaaaatcaagcgtaattacattatcttctgtgatttcaacatgaattccccttgtcaggctttctcttttcaaaagatgtacaaggccatctttcatattaactgctgccattcctactatgccaaagcactcaattgccattgagcctgcatattttgcaatgacttcaggattgattgtaatgattccaagatctgtactcatacttcccttcatcatatattccctccaattctataggttctttccatatataacatgactattatactattactttttgttttttacaatacagttttgatttttttaaaataacacttgcattactcgaaagattctgatagaatatcattgttatgagtctaaaagaccagtttagattgttaggaggtgcagtcatggctaaatgtgctatttgtgaaaagggtgctcattttggaaacaatgtaagccactctcatagaagatcaccaaaaatgtggaaatcaaatgtgaagtctgtaagagttaagacagagggcggttctcagaaaatgtacgtttgtacttcttgcctgagatcaggactcgttgagcgtgcttaattctcgtttgatgattcaatatgacacggtataaagaactttatctgtttcttcggataaagttctttttttatctgcagaacagacaatatgccagtacaataccagtaattgcgatcacagttccccataagacatcagaaagcagcatcatgacgatcattcctgctgcaaaccaaaacaatgcaaatccaaaaactttcttcacaatactgctcccaatattttctatattctagtaactattttattctgcatccagaatatctgctacatcttcttctgttaatttttcatcttttgatgtaaaacggtctaccacatcaggtaccatatccaaaagttttgtaattgtatcctgattcttgatattcacaagtttcgtctttccatcctgaataacgatcacagcactcggtgtgatctttccaccgattccaccgcctgctctgtctttcttttcagcgttaaaagaacctgctccaataccaaaagagacatctaccaatggaagaatgattgttccgttgatatgtatcgcatctccgacaactgtctttgatgaaacaacgctgtccattccctgaaagagtgattctactgtttctttaaatttgtttccgtctgccataatcctgactcctctcattttatatattttctaatgtgtttgtaggtaatcttcacatctttattccagaatagcttccatgcaggaacagcaaagtaaataacccggatcttcccttctgcagatgcatttccctccagctttcgttcttcaaaatccggctgaatctgaacatactcaccaatcagtccgtaaatgctccccagaaaagctaacatatatcctgtccaggaaggatcactgaatccaaatgtaacattcgcctgaagctttttaggcttcagaacatgtaacagatggcataattctttcttcactgcctcgaatgcccgttgatgattctcgtaagttaaaaaagcggtcagaaattcttttttctctcctgctttttttatagtaccacagagtttctgaaatgtatatttgatttttttcaatttagattccgtctgtacgttttcgggcctgcgctcctctcgaactttcgtcttttctgtctctgactctttttttatctctggctctttttctgatgctttctcaattttcacatctttttccggtggattattctttacttccgtcttcttaccttccaaaggttctttttccaacggctcaggaaccaccggcttctctgacgtttccttttgttcctcttccgaactgtcaaatttcttccaggcaagacgaaacttccattttaattctccatgttcataagacgctgatccggaaatcagatgaaacagccaactgacctttccatatgccacaagggtatcaagtgtattctccccttttgcagaaaatctgtatttcaccggataaaacaagattgttaaaatcagtaagagtaaaattacgagcaaaaaaagaagaatccatccaattattttcagtataagaaacaggatatgtatcatacgcttcgaatctcctttttctcaaactcttcctgacgatccaaaaggaactttctcaagtttacctctcccgtcttctcatatgcttcttccgcaatcctttcgatcagactcaatgcgccatcatacccattcgcaattccaacaataaataaagatgcattgtcaaatatatgttgctttaaaagaagcgacgaataatattctaaatggttctgctttccctgtgaaagcgtaattacatagacagaaggctgcagtttatttttctgcaatttttttattaatttcagttttttctcttcccagccttcgctgacatataaatcacagaaaaattttgtctgcatcttttctcctcccattagttgtaataggcgtctaaaatatccccggcgattgccactgcttttccgctggaacttccatccgaaccttctgtgatcacactgattaccagatccggattatccacatttgtaaatcccataaaccaggaatgtgtcttttctccatctgacatactgtactctgctgttcccgtttttcctgcagcagtataggatcttccttttaagacagatcctgttccttcctctacaacagctgtcatatactctttcaattgtgcagcttcatccgatgtcatgaccttcttataacttttcggaacattctttcgtatctgggagcccgtataattcgtcacactttccacaagatatggctgcatcatggttccaccgttcgccactgcctcggcaatcagtgccatatgatatggacttacggttgtctttccctgtcccattgccgtcatcattacttctccctcactggaattctgatccagtgcaaaggagctcttcgctgcattcagtacacccggaagcgatttattgaacaataaatcttccgccgtctgacggtattgcgtcagatccaggccaagaccaatattggcaaaagatgaattacaggaatttgcaaaggaacttctcagatcctctgagccatgtgcatttccattaaagcagtgaattgtaatatctccctgtgaaatctctccattacaatcatatgtataattcggataatcactgttctgacgcataaaagcaagtgttgtaaccactttaaacgtcgatcctggagcataagatccttgtgtcacacgattcaacagcggactgttttcttcatctgaattcaattctgaccagtcacttaaaatattattcggatcatatgccggtttggaaaccatggcgagaatctttcccgtactcgcctccattacgattgccgcacctttgtttgatccaagcgcatcataagccgcctgctgcagatttgcatccaatgttgttacaactgtatctcctcgattcttcttttcactgaattcattctgcagtttttcaagaaagaatgcatttgatgtcagaagctcaaaattctctaccgattccaggcccgtagttccaagtttggaatcactgtatccgatcacatgagcaaacacttctccataaggatactctctcgtctctgatccatcatccccaacggctgtctgtgcaagcacatttccattcttatcaacaatgcttcctcgtataatcgtatctgcataagcatcctgtctttgattatatggactgtttactacaagttttgcccgcacgaccataaaatatacaagatatcccatcaacgcgataaagagaatcacgaaaaagtaagtgactctagcgaactctttgttccgaacgcgttctccgctgtctttgctgccgctgttccgggacatcctcgaatctcggtctgctttttgttgttttcttaccggtcgttcttcccgattcatttcttaaatccctttctctttgtcttgctctgtctctgttatctccatcatattctcttcgtctgtcacgtccatcctgacgggatcttcctgattttgcattcgaactgctctggcgacgtctttcattctgcctgctgcggtttctctgtcttgcgcgctgcatctcaatctgatgctcttcttctgcttcttcatcttctctgacaatgtagagcccctgaataatcccaaacatgatcatcgtacttaacagagaacttccaccataactgacgaatggaagtgttactccggttaacggaatgaactttgtcactcctccgatctgcaaaaatacctgaaaaatatagcaggttcccagaccaagtgctactaatttatagaagaaattacgcaattccatcgcaatattcaaaaacatcacataacagctgacgcatacaaggatcagacacagtgtaaaaatcagtcccatttcttctgtcattgcagagaagatcagatccgtctctgcaactggaatcgtatccggctgaccacggaataatcctgttccaaaccagccgccacttccaatcgcaaacaacgactgggcaatctgatatcccccttcgctataagctgcaaacggatcctgccatgccgcaactctgaccttaatgtgggaaaacagatgatatccaaccactgcagctccacaccctgctgccacacctgcaattgcatataatggctgccttgtcgcaacatatagcataatcagatacacaacaaagaagattaatgcagctcccagatctgttgacaatacaaggatcagaacatgtgctgccgctatcgcagtcgtaacaacaacattcttaaattctgtcgatttattcaggcttgctgctacaaaaaatacaaacagaatcttaacaaactcagaaggctgcagactcacaggtccaatattgaaactcagctttgctcctccaagtgttgctgcaaacaatgcaacgataagaagtgctgctcctccaactgctgcatagatataagtccagttctccaggaaagtcatcttccggatcagaaccggaacaataagaccaaaaacaataccaacaacaacaaataccagctgacggattgcaattccataaggagacttactctgtgcggaaagccttgtgatcatgatcattcccgctgtgatcaacatacacatattattgacaaccaatctcgaaacattcgggtaaatcagattgtataataagatgactgccatcacaatcactgccagtgcaccatatatgaacatcatcctcagatcctgcgttgcaaaatacattgcaataaatgcagtgatctgtatcataaatagaagtacatcctgacggatcaatactttgttttcctcatcttcataacttctcgtaaagattgaaaaacaggaaaaagtatataccgccatcaagatgatgataaggtattttgatacctgaataataatattagccatatttcacctgcttcaaataattcctctgttgaaatgtcctgttgtaaaatctgtatcttcttttcctctggcaacagttttttcatctgttacaaaaaatgtattcagaactgtttctgtctgttctttatcttccagagtaaactggatacggcgcatctttggatacaattcattcactctgtcccattcctgtcttagattgatcggattttccgtataaatcacattataacagagatcacaatagttacgcgcaaagaatttttcgtctcttctgtcttgaagcactcgtactcccggtttcttagaacagcctgaagttgttctctcaatacactgtgcagataccataaccggaattcttccgtaaacaagaagttcaccgtctctgatatcaagttctcttagttctctgctgttaagctccaacggagctgtaaaatcctcaactttttgctgcttccaaaattctttgccatactgattaaagatatatagattatggtctaatataatctttttgtcaaatcctctttcttttaagaaaaagaaagcttcaaaatttcgaataacaacgccgtcaattggcaattgattaaagttttcaaattgtcttccaaaccattcctgcgcattctctctgaaaatatgtggaaataccagatacaattcaactccgctttttctccaaaaatcaatcctgtctctgacatgtgtgtctgaaaaatctgtgccaaacaaccggaaatctaatgcaatccggccaatccttggagttccctgtccataaagttcctctttctgattcaaaaagctgaacacggcctctaactgttcctctgtttcaataaacacagaatatctgttcagatttccatttcctgtctcttctttaaatgtttctacctgtgtcgttgaaggattgcattccctgtaaaaagcagttgcgatctctcttctcaatccatccagtgctgctcttcttaaactattcagctgctgcatcggaagaaatgcatcctgatccatagatatttccagatctttcaggaaaaatagcgtaccgcctgtcttcgcaagctgtgtgcgaattctctcttcctccaatgggcgcttctgtgcacgttcaactgcatgttctgtatatgctgtataagaaaattccctgcagcagaccgtaaaagatgccggatatccaacctgaaggctcaaaaatccataaatctcctcctgccggtcttctttcctgtatttctgatccagactctcaatcagttcttcatttcggattcttctaaaaacaaagccttctttaaaacgcatccccttcggcacaagaaaacgtaacttttctccctttgtgatcttcttgccaagtgtataattatctttcccgctaccgatttcaagaacatcatgtgcatgcagatctgtcaaagcctgagctgtgacctcacgtccattttgcgacagacatctggctgctgctactccggcatgattcggacgatccagtgccagcatttctcttccattatgctgcttataatatccggtatctgaatcaccgcgattataaagatccatcaggttttcgcggtcttccggtttcaccgcataaccacttttcccttttttcaaatataaatccacatatttccgatacatagctgttactgctgccacatattccggtttcttcatgcgtccttctatcttaaatgagtcaatcccggcttcaaccagttccggaattaattccaacgtacagatatccttcaggctaagaaaatatttcttctgaccatctactgtataaggaagtctgcatggctgtgcacattgaccacgatttccacttcggccgccgatcacactactcatcagacactgtccggagtaacaatagcaaagtgctccatgaacaaaacactctacttcaaggtccgttgtttcatgaatctgtcgaacttcttccaacgaaagctctcttgccgggacaactcttgccgccccctgactctctaaaaacttcgctcctgccgcaccagtgattgtcatctgtgtactcgcatggatatcaagatccggaaaattgcttctgataaattggaatacacccgtatcctgaacgatcaccgcatccaaacctttctcatataatggtgccagataatcatacagttctgcaatctcatgatcttttaataatgtatttactgtaagataaaacttcttcccataaatatgagcacgctcaattgcttcgatcagctcatcctgtgtaaaattgtttgcatatgctcttgctccaaaacgtgctcctgccgcataaacggcatctgcacctgcattcattgctgcctgaaaacatgcaaaggatcccgccggagccagaatctccacctgtcggtcttttctcattcttctgtcattatccttctctttattgttatgttcacataattcgtgtaaactatgagaaacacgctccgcgagtttctcaagttatcgcgacagtcgccaaggtctcgtgcaagcacggactttggctcgttgttcgcgtaaatgaaaaaggctgccaaagtgacagcttttctcatttaccttcttcggtttttcatctctgtctcgagcttaacaatctgcatctgaaggtcattattctcttctttcatctttgcaagctctttctcagcattctcaagtttgatctgggctgaaatcaattcatgcttcagatcatacatctctttatctttgagctcgatatcgctttccagcgaatctccctgtttctttgctttaaaataatcatctgcaatattaagtgcaagaaggacattccttgtgtctgcactctgttttctgtatccttcactgttcgtacattctgtgattttatgattaagataggaagatactttctgcagatactcttctccttcaaagccactgagagtatagacttttcctccgattaatacttctgtaaaatgttttgctgaactcatagcttcctcctcgagtttctattcttctattatagactatttatcctcaaaaaccaactattttttcagaatttctatacttctctcggaattccaagatgttggtaagctaattctgttacaacacgacctcttggagtcctctgaatgaatccatttttcaacaaatacggttcgtaaacatcttctaatgtgcctgcatcttctgaaatcgatgcggcaagtgtctcaagtcctaccggtcctccctggaacttctcaatcattgtgatcagaatgttacgatcaatatgatctaatccgaatttatccacgtcaagaagatccaatgcataatttgctacttcttttgtgatcacaccatcatatttaacctgtgcaaagtcacgcactcttttcagcagacggttcgcaagtcgcggtgttccccttgatcttctggcaagttccatagcaccttcttcttcaatctctacacctagaacatgtgcagaacgcagaatgattgtcttcaactcttcttcattatataactccaaatgatgcactacaccaaaacggtctctgagcggtgctgtaagcattcctgctcttgttgttgccccaaccagtgtaaatttgggaagattcagacgaacagaccttgctcccggtccctttccgatcataatgtcgatcgcataatcttccattgccgggtaaagcacttcttccacctgacggttaagtctgtgaatctcatccacgaataatacgtcatgttcctgcagaccattcagaattgcagccatctcgcctggtttctctattgccggtccggaagtaatcttcatatttacacccatctcattcgctatgattcctgccagtgttgtcttaccaagccccggcggtccgtaaaacagcacatgatccagtgcttcgccccttgctttcgctgcttctatataaatactaagtgtcttctttgctttctcctgtccgatatattctgataaaagctgcggccttaactgtccctctatcttactgtcttcttccagattctctgtcgttataattctcttcgccataaccgacctctcatttcataactctttacttcaaattttgtaactgatcagagcagattctttaacgcttctctcaaaagatcttctacactcgcacaatcaacagataccttcttcactgcacgtaaactctctgcacttccatacccaagtgctgtcagtgcctgtaccgcttccgcctgcattccggtatctgtcgcctcaatttcttttgactgttcactgccatgtgctgcctgttccagaacatcctcaatgctcatcttatctttcaactccagaatcagcttttccgcggtcttcttcccaattccaggagctgatgaaattgtttttacatctccggccagcacggcaaaacgaagttcatccggagaaaggcaggaaagaatattcagaccggctttcggtccgatcccgctgacaccgatcaacagtctgaaaacctgaagatcttcgcctgttagaaatccatataattgcattgcatcctcacgcacgttgagatatgtatgaattttcacttcttccccaactgccggaagcatggataatgtctgctgcgacatataaattccgtatccgattccacccgcttccacaatcgctttctgctcctggactgctgccagttcacctctaatatatgatatcattttcctctatccttttcccgccgcaccaaaaccgcaacgcttccataataattataccagagaaattccctggatcctttttaaaacttcttttgccacaagtccgatcagcagcccggtcacttctcctgccactaacaaaaccggcagataataccccacctgatatgtctgtacaacaaccattgcaacaagaagctgcccgatattatgtgctgtacctccgccaatactgactccggcaacactgaacctgtctgatttcttaaggagaaccataacaaggaaactcaaaagtcctcctgataaactatatagaataccaaacagatttccgaacatgaagcccgataaaataatccttgtcacggaaagtgtcagtgcctcttttatccccatcttgtacagaacaagaactgtcataagattcgccagaccaagttttgctcccggtattccgaaattaatcggaatcaaaagttccacatagctaaaaatcaatgccaatgctgtaaatacgccaaatatcgctacttttctaccgtgcaatctcatccacctccggttcctctccgccacggatcgttactacagtctgattcggcagacagattatactttccccatctcttgaaattgctctgtggtttacacaaatctgatccggacagtcagcatcttccatacgaacctttctgtcctttatgagtactttattcttatcatttacatcaatttcctgatcctgttccaagcggtatcttccatacaactcgccatttacctgaatctctacttcactgtattcatctgtagtttttaagagctgtaaaccaaacgttaaaacagctacaaaaaaaatagctgctgcaagtatccagtcattcttcttcattccgcaccatctttcttccataatggttttgctaattcatcatagcacaaccatattttgaatgcaaccacatgttcgattgtatttttattcaaacctcgttataataaacacatcattcatttatattaagaacggagattttatgaaacacaaaaaaatactggcttgtttccttacattttcttttctgctgaccggatgttccacaaaagatcagtcacagtcgctttctatgacaggaacctatttcgacaccgttgttaagattgaagtctggggagcagattctaagatcatggatggatgcaaagatatctgtgagaaatatgaacaactcttaagtcctacgatcgattccagtgaaatcagtcagatcaatcaggcacaaggtgctgctccgtttctgtttcgaaagaaactgctgatttaattgaactgggaaaatattacggggatctttccggaggaaaatttgatatcacaatcgcttctgccagtgatctttggaattttcacgataatgcggatcatagcatccctgacgcagagcagctgtccgaagcagttactcatatcaattataaaactatagaggtcaacggaacaacggtaacaatgtcagatccttatgcaaagattgatctgggtggtatcgccaaaggctatattgcagatcaggtaaagaattatcttatagaagaaggaatagaacatgcctatatcaatctcggtggtaacatactgacactcggcggaaaaacagacggttccaacttccggatcggtatccagaaaccatttgcagaagatgggacagttatagccgttcttccggtatctgataagtccatcgtatcttccgggaattacgaacggtactttaagaaagacggaaaaatttaccaccatatccttgatccttctacaggatatccaatagaaaataacttaaaccaagtcacgatcatctctgacaaatcggttgacggggatgccttaagcacaacctgttatgcgcttggactggatgaaggattaaaacttatccgaagtatggataatatcgaggcagtatttattaccgatgacaatatgatttataaaagcagtgactctgtcaatttaatcactgatattaataactagaaaaaaggaagctgatcaatttaaattttcagcttccttttctgatctcttttcttaaataaatttctgtcttattatgtaactgttcagagccaagcaaaatttcataaaacaggtgtaaaatgcttgcatttttaagactgtttttgaaattttatttggcggatacgccacaccgacgaaatgcgtagcattttggaggttggctctgaacagttaccttattattagcgtaacgtaataatctttctcgggcatttttctacacagacaccacactctgtacatttatctgcatcgatatgtgcaaggaaattcgttacagtgatcgctcctgcttcacagttcttctcacaaatgcgacatccgatacatcctgcctgacagattgccagctgtacttttccttttgcattggaattacagcgtacaaatgtcttctgctcatatggaatcagctcaatcaagtgctttggacatgctgcgatacatttcccacatgctttacatgcttctttatcaacaacagcaattccatctactacatgaattgcatcaaacggacaggcagcaacacaagaaccgaatccaagacatcctgaattacatccttttgctcctccattctgcatcatgcttgccatcgtacaatcctgaatacctgtgtaatcataatctaaaattgctttttcacaggttccggcacattttacaaaagcggtctgtctctcttgtgtgcctgctgcaacacccatgatatcaccgatctttgcagcaacaggtgccccaccaaccggacatccgccaacttctgcttcaccttttacgattgccgctgcaagtcctgaacagcctgcataaccgcatccaccacagttatttcccggaagaacacctaaaattgcttcttcacgttcatctacttttacagcaaacttcttacctgcgattccgaggaaaacaccgatgaataaaccggttccaccgacgactactgccgccaaaataattcctgtcatactcatttgctcttcctcctaaattaatcccgagaatccgaaaaatgcaattgccatcagtcctgctgtaacaagcacgatcggagtcccctgaaatgactcactaatatcattgtactcaatcttctcgcgaattccggccatcagcacaattgatacaaggaatccgacagctgtagcaaatccattcacaacacctgtgagaagtcccatacctgcactcatgttatcatagtagccattctgtacgtttgtcagtgctactccgagaactgcacagttcgttgtgatcagcggaagatatacaccgagcgcattgtataatgatggcatcgctttctttaagaacatctctacaaactgtacaagtgctgcgattacaagaataaatacaattgtattcaggtaggataattctccccccatgatatttggatttccgagaataaacttatagatcaatccagttacaaaagatgcgatcgtaataacgaatacaaccgctccgcccattccggcagcagtcttcacattcttggatacaccgaggaacggacatataccaagaaactggctcaggacaacattatttacaaatgctgaaccaactgcaattaataataattctttcactttctgtcccctcctttattcgttctttgcgtcttcttcgcctgtcgggaagatctttccactgcaggatgaagcattcccacagcttgcacagccttctccgcatccgaccgtctccggaactttctttcctttcttcgccatattgttctttactttattctgtaaagcaacaagacctgcaaggacaaagaatgctcccggtgcaaggatgaagattgtcagtggctcgtaagattccggcataacacggatatcaaagatcttaccagcaccgatcagttctctgacaataccgattgctgtaagaccaacagtaaatccaagtcccataccgattccatcaaagatagaaggaagaaccggattctttgaagcataactctctgctcttccgagaatgatacagtttacaacgatcagaggaatataaagtccaagtgaatcataaaggcttggaacgaatccttccatcaggaactgtacaattgtcacgaaagaagcaacaataacgataaatgccggcattctgacagaatctggaataatctttctcaacatagaaatcaacatgttagacatgatcaatacaactgttgtagaaagtcccataccaacaccgttgatcgcagatgttgtaaccgcaagtgtaggacacataccaagcataagaacgaaggtcggattttcttttacaaggccgttatacagccgttctgcacatttattcattacttccgcctcctaactcattttgaaaatatacaagtgcagagtctactgcatttgtcacagcgttagttgtgatcgtagcaccactgatggcatcgatcatgtcatctcctgactctcctgtctttgtatatgtaaacttttctacattcttatctttaaactgatctttgaaatctgcttccttagctttcattccgagacctgctgtctcgctgatactgagcatctcaatacctgttactgttccatcttccctgatacctacagaaatatcaatgtctccgccgtatccttcatgtgatgtaacatttacaacataaccaacggtctcgccggaagagtcttttccctcagccacctcagaaatatcatctgaagtgtatccattttctttcagaagagcagaagctgcatcagcatcaaattctctatccgattcaaatgtctctgcatctgaaagaacagaacgaaatgcttcctgttttgcctcctcctgtgctttcgcgatcggatcttttgtcacaccatatacaactccgagaaggagacccgcaacaacagtgatcgctgtcagaatcaacgtgtttttaacaattttattcattacttttctcctcctttaccaaatggttttggaagagtaaccttctcgatcaacggaactaaaaggttactgatgatgatcgcataggaaaccccttctgctgatccaccaaaaagacggaacagaccagtcagacatccaagacagattccaaaaaggatctttcctttgctcgtaatcggagatgtcacataatctgttgccataaaccatgctccaagcatcagaccaccaccacaaagatgtgctgtgatgtactgaggatcgaatccatgtcctccaaacaatgtgataaaaatcacaaatgtcacaatgtaagttccaggaattctaaggtcaattacacccataagaatcaggaacattgcaccgatcataattgcaactacagaagtctctccgattgttcctctgatatttccgagaagcatagacaatgtattcactgtttctcctgctttcaactctgccagaggagtcggccccgtcactccgtcgtaaacaaaataagtcatcttacctgcaaaacagatcaacagaaaacaacgtgctcccaatgcagggttcatgaagttctgtccaagtcctccaaacaactgtttcacaacaatgatggcaaatactgcaccaagcacacccatccaccacgggagtgtcggaggaagattcaatgcgagcagaagtcctgttacaactgcactgaaatcattgatcgtaattggcttatgcattaatttttcataaagatactcagataaaacagccgctgccgttgtaacaactacaagaatccaggcattctcatgacggaaattccagattccaaaaaatgtagccggaagaagtgcgatcacaacataaagcataatgttgctgcttgtcactttatcacggatatgcggcgaagaagatacgttatatttctcgttcactttacttcaacctctcttatttcttctttctattcgccaatgctgtcttacgcattgaaccaattgcctgtttcagctgacgttttgccggacagacataactgcaggaaccacattccacacattccaatccattccatgcaacaaaagatgcctcatcttttctctttgaaaagtctgcaagtctggatggaataattctgcttggacagatctccacacatcttccacagttaatacatgcagtctcaagactctttgccacaacgtcttctttaaaaagcagaatagaggaagaagtctttgtaaccggtgcatccattgtcaccatggcaaatcccatcatcggtcctccggagatcagtttctgcggttccgctttcaaacctcctgctgcctcaaccagctctctgtggtttattccaaaaggagccataaagtttcctggtttttcgactgcatcgccgctcactgtaacaacacgttccatcaacggttttcctttgattactgcattgtggattccaatcaaagtctccacgttatcaacaatacatcctgcatctgccggaagcatggtagaattgattgctcgttttgtcactgcatagatcaactgacgttctgccccctgtggatattttgtcatcaatgctttcacatcaattcttggttcgccggcaactgctttctgtaacttttcaatacaatctttcttgttatcctctacagcaaaaacacctcttgcatttgggaataaagaaaggatgaccttcattccgctgacaagatcttctgtatactcgagcattcttctgtaatctgcagtgatataaggttcacactcagcacagtttgcaataatatattctatcttatccggttccttcggagaaagctttacctttgtagggaatcctgcaccacccattcctacgattccggcatctccaatcttattaatgatttcttcccttgtcatctcttccaaaggctttaccggttcatattcaacttccttatactctccatcgttttctacaacaatgcactccacctgggatccagttggattaaaacgttgttccaatcctttcactttaccggagacagatgaatagattggagaagatacaaatcctcccgcttcagcaatcaactgtcctttcagcacacaatcgcctttcttaactaccggtttagccggtgctcctatatgctgtgaaagtggatagaccagttcaccctgaggtactacaggtctgattggctgatcctttgaaaaacgttttccatcatccggatggattccgcctttaaatgtcaaaagccccatctcatttccttcctttcttttatcattgtcattacaacaataatattttaattttgtaatacttattttactagaatgcgctctgaaaatctagcaaatatgtaataattcttgtatctttcgctatacatcttgtcgaatttttaacagaaaaagaacctgccaatggcaggttcttctaaaagataatttatatcttattcttctgtctcttcagcattgtcagcctcaagagctttcatgctcaggctgatcttcttctctgcttcgttaagatcaacgatcttagctgtgatttcctgtccgattgcaagaacatcagatggtttctcaacatgagctcttgaaatctgggatacatgaagaagtgcgtcaactcccggtgcaagttctacgaaagcaccaaagtctgtcatacgtgcaacttttcctgtaactactgtacctacagcgaaatcttctgctgcatttacccatggatttgtctctgggaatttcaggctgagcgcaatctttgtatcatgaatgtcttttacaagaactttcagtgtatctcctacatggaatactttcttcggattgtcaactcttccccatgacatctctgagatgtgaagaagtccgtcaacaccaccaaggtcaacgaatgctccgaaatctgttacattcttaacagttccttctactgtatcaccaacattgagtttcgcgaacagctctttctgcctctcagcacgctctgctacaagaagctgtcttctatcaccgatcacacggtttcttctcgggttgaactcgctgattacgaattcgatttcctgtccttcatacttgctgagatctttctcataagaatcggaaacaaggcttgccgggataaatactcttacttcatcaactgttgtacaaataccgccgccaagaatctgtgtaactgtagctttcagcacttcgtggttttcatatgcttcgcgcagtctctcatttcctttttctgcagccagtctcttatatgtaagaagaacctgaccctctccgtcatttactttcagtaccttaactgtcattgtatcacctacggatacaactgttgtaaggtcaagagactgatcgttggaatattcgctctttgtgatgataccgtctgctttatatccaatgttcaggataatctcatccggtttcacgtcgattactgtaccttcgacaacctctccattgtgaattgttttaaatgactcttctaacatctgttcaaaagataattctgacattattttgaacctcctcaattatattgttgggcgtggatgcccctgctgtaatacctaccgtttccactgaccctaattgattcaaatccaaatcgccaagtgtctgtatatagtacgtattgttacatgctttgcggcatatttcaaataacttctgggtattggaactatgtttgtcaccaataacgatcatagcatccaccgtctctgctatgctctgcgcttctgtctggcgctccttcgtagcattacagattgtatttaaaacacttacatcataactctttttttcaagaatttcaactaattctttaaatttattgtaattaaatgtcgtctgggcaacgatacaaatcttttttccctgctcacaagaataattttctgcttcttcctttgtctgaaagacctctacatgatctcctgcccatcccttaattccctgaacctccggatgttccggatttccaatgataataatattctcgcccatctcactgtgtttctgcacgatattatggatcttcttaacaaatggacacgtagcatctacaatctggattttcttattttccagtctgtcatacacatcttttgccaccccatgagagcggataataacggttcctctttccagtgtatccagctcttcttcgctgcgaagaacaatcacacctttctgctccagatctttcaccacttcttcattatggatgatcggaccatacgtatagattggaagattctgattctcttccacctgttcataaactgtatccactgcacgcttaacgccgaaacaaaatccagctgatttcgcctttattactttcattctatccaactcctgcaaatttatctatgacaatatctggaaatcgtgtttacaacttctttcagtgtcatatccgaactgtcaacaagtattgcatcctctgcttttttcagtggcgcgatctttcttgtcatatcacggtagtctctttcttcaatatctttctctatctctttcagatcgcactgtactcccttttcaacaagctctttatatcttctctttgctctgatttctacgcttgctgtaagatagatttttacatctgcatccggaagcacatgggtaccaatgtctcttccatccatgatcacatccttctctcttgcaagcgttctctgaagttccagaagtttttctctgacttccggaatcgcagatgtcatagaagccatatttccaacttcttctgtacgaagctttgctgtaacattctctccgtttacatagatctgctggattccgctttcataaccaatcgttacttccacatctttgcaggcctctataatcttttctgtatcttttggatcaattccaagattcagaaagtgaatggccaatccacggtacattgcgccggtatctacataaatatatccgttttcttttgcaacctgctttgcaattgtacttttccctgcccctgccggtccatcgattgctacattatatcccatttttattcctccatcttttctttccacattccattttcaaatctattcgttactgttcacacgatgtgcgaccagcaacatctattcttcctgtcacaggattcagacattccccagtaaaatttcaatcacatcctgcgttaattccggcaagataccctgttgaccacgcaatctgaagattatatcctccggtcactgcatcaagatcaagcacctctccggcgaaatataatcctttcattttttttgattccattgttcccggatcgatctcctttacagatactccgccttttgtaatgattgcttcattataactgcgaagccctgtcaatgtcattgtaaaatccttgatcagatgaaccagtctctgtcgttcttcttttgtaatctcattcacttttttctcaggttcaatctccgagagttctatcataacaggctttaattttgccggaaagagtgaatcgattgaatttttatactgtttattatggtttgcatcaaactctctgaggattcttttatcaagttgttcctcactcaatgccggttttaagtctatatgaagtgtaagttctttttttcttaaagtttttcccaccacactgctcgcgctcagaataaccggtcctgttacaccataatgtgtaaaaagcatttctccgaattcttcgtaaagttttttcttcccatctgtgatacaaatttctatatttcgaagagataatccctgcaattctttcgcataccattgtctgacttccatcggtacaagtgatggaaggagttctgtcactctatgccctgtttctttcgcaaaacgatatccatcgcctgtagaacccgtagaaggataggaaataccacctgtcgcaacaatcacagcatctgccttcattttctttccattagttaataaaaccccacacactttatcctgctcacaaagcagttctctcacctctgtgtgaagagaaacagctactcctaatgattttaactctcttgaaaatgctgcgatcacatcagaagaatgatctgaaacagggaaaactcgttctccacgttcaattttcgtcttcacaccaagttcttcaaagaaatcgatcacctgctgatttgtaaaactgtaaaatccactgtataaaaatttcggattacttgtcaccgccgtaaataaatcttctatatcagcggcattcgttatattgcagcgtccttttcctgtaatgaacagctttttcccaagcttttcattcttctcaagcaactgaacattctgaccatttcttgcagcgaaaactgccgccatcatcccggcagccccgccgcccactacgatcacattactcatggtctattcttctcctttattctgtctgtaagactcattcgttcctgcgctgccaccttcctggctgctttcttctccgctgtaaacctgatattcaccccagattttctccaacgtctctaacgtcgaaacaacttccttctgctttttcatacaaatcgcaacaatcagtgcattgatcacactcaatggtgcaacaagtgaatcgacaatagatgccatatcacttcttgcgatcagattgcaggaagaatactgattcataggtgaatggatactgtcagtaagtgtgattacttttgcttttctattgctcgcaaattccaatgctttcaatgttctcatcgaatatcttgggaaactgattcctatgatcacatccccttctccgattcgaataatctgttcaaaaatctcactggaactgtttgtatttactgtaattacattgtcgcatacaagattcagataaaatcccataaaagaagcaagtggtgcacagcttctgattcccacaacatagattctctttgcttctaaaagggtatcaattgcccagttaaatgccttatgatcgattgcagacaaggtcatcttgattttctcaatgtctgactgaagaacggtttcgagaatctcactctgtgtaattcgtccataggtcacttccatacgctggattgaattcaatttattacggacaagttcctccaacgctttctgaaattccgggtatcccctatatcccagctgggttgcaaatcgtacaaccgtagattcactgacacccacaatctctccaagacgcgctgctgtcagaaatacagccttatcataattttctttcacatattctgcaaggcgcttctgccccttgctcatcttctcatattttgcttcgatccttccgatcagctcattcatattcgcttcaatattgcgttctgatgtttccattcttttacactattcctaatccctaaatatttcattatccgtccagcagcttcaacagatacataagagttctgtcatacctctgccttgctgattacttcacagcccgcgtgtactctttcagccagattcgttcttcctctgaaaggtaaggggacaccttttcataaacctgcttatgataatgattcaacatttctttctcctctgtactcattttctccggcaagattgcatccagatcaattggtacataagtaagaatttcaaaattcataaactgtccatactcattcttaactgtttttctgacaagcagctcattttccagacgaattccataagaaccctcaatatagattcccggttcatctgtgatcaccatattctcttccaatgccggagccgacctctctccctctttccaacggaaattgatcggtccctcatggatattcaataaataaccaacaccatgccccgttccatgattaaagttcagtccttctttccaaaagatctctcttgcaatacaatccagattcacaccactgcatccgtagagaaatacagtgttcgccaggcgtagcattgctcttgcaaccagtgtgaaatgttctttttcaaggttccccacttctccaagtgcaaccgtacgcgtaatgtcggtagacccttccagataatgaccacctgtatctgtcatgaaaagctttccttcttttaaagggacattgcttttctcatccgcactataatgaacaattgctccatgttctccatatgcactgatcgggccaaaacttggtccgaggaaatgctcctgctctgcacgcaatccttccagcctggcagaagcagacagctctgtaatctccactctgccaatattcttctttaaccagtacataaactttgtatgtgcaaccgcatccttcaaatgtgcttttctcaaattctctgcctgtgtttcatttttaactgacttcatcagaatttccggattctgcttatcaataatcaccgtctctttggaaatggcctgataaagactatagttcatgattgaagaatccaaaaggaccttatcttctgatgtcatttctgaaactttgtgataaatatcctcatacggataaatcttcacttgattttctgctaatgaattcacaatatcgtcagagaattttctaatgtcagcaaacagctcaactgaattattataaacgattgcataagaaagaacaagtggacaatacgcaatatcatttcctcttatatttaaaagccatgcaatatcatcaagactcgataaaacatgtgcattgcatccattttctttcattatttctctgattcgttctaatttggatccaattttttcacctgtatattcatccgctagagaaaatacagattccatagacatttcaggtctttccttccagatattctgtgcaaaatctaagctatatttcaatgatgcgccattctcatctgttatatgacaatatcgttttccttgtgcataagtcactgtacgaccatcaaatcccagaacatccccttcttttagctcactttttaaaaattcttctatcgttggaacatcagattctcctgatttatagagcgtgatcccgctccccttcaactgagcttctgcctgaataaaatatcttccatctgtccagagtcccgctttatcctttgtaaaaactgcggtacctgctgatcctgtaaagcccgttatatattcgcggaatttaaaataatcaccgacgtattcactgtgatgatagtcatctgtagggatgatatagcagtctattttctgctgttccattacatttcgtaatcgctctattctgtctaaaacactcatatctgcctccatatattccaacaatcaaactcatattacaaaaacttgattattcacaattgtacacatctatgataccaccaaataaatttccttacaaatgaaaaagaccagaaaacacaaatctttccatctgttatcttctggtctttctattcaattcataatctaactaaatcagtcaggattataccggataagatccgttctctgtatctgctactgtagcatctacttttgtctgctgagcctgtctgtatttgaagaagtcaacagcaacctgtgggaacagtgcatatgtcagtacatcctcatcctgctggatccactgtgcacactctttacgaagtgtatcaagctcatccgggataagatctgccggacggcaagtgatcggttcttcatctccaagagccttcttctgaagttctggatcaaccggttttgttgtcttaccgtatttacctgcaagaacatcctttgtctcttttgtgatcatcttataacgttcacccatcagtacgttgaatacagcctgtgttccaacgatctgtgaagatggtgtaacaagcggtggctcaccaagatctttacgtacacgcggtacctcttcaagtacttcatagaacttatcttctgctccctgctctttcagctgggatgtcaggttggaaagcattcctcccggtacctgatacagaagagtcttgatattaacaccaaggttcttcggattgagcagtccgctctcaagagcatcatcacggattggacggaagtaatcagcgatctctgcaaggagactctgatcaagtcctgtatcgtatggtgttcccttgaatgtctcaaccataacttctgtagccggctgagatgttccaagtgcgaatggagacattgctgtatcgatgatatcagctcctgcctctacagctttcatgtatgtcatagaagcaacacctgatgtgtaatgtgtatgcatctcgatcgggatgtttactgcatctttcaatgcaccaacaagctctgttgtcttatatggaacaagaagtcctgccatatccttaacacagattgagcttgcacccatatcttcgattctcttcgcaaggtctacccagtattccattgtgtaagcatcaccgagtgtataagacattgcaacctgtgcatgagctttctctttgttcgcagcctttacagctgtctgaagatttctcatgtcattgaggcagtcgaaaatacgaatgatatcgattccgtttgccacagatttctgtacgaaatactctacaacatcatcagcgtatggacggtatccaaggatattctgtccacggaacagcatctgaagttttgtattcttgaatccatcacggaactttctaagtctctcccatggatcttctttcaggaaacggagggaagcatcgaatgttgctccaccccagcactctacagcatgatatccaaccttgtccatcttctcaacgattggcatcatctgctctgttgtcattctggtagcaatcagagactgatgtgcatcacgcagaatagtttctactattttaactggttttttttcaatttctgccatttatttatcctcctaatttacttaacgccgaaaatagccataaatgttccggctgctactgcagtaccgataactccggcaacgttcggtcccattgcatgcataagaaggaagtttgtaggatctgcctcagcaccaaccttctgagatacacgggctgccataggaaccgcagatacaccagcggaaccaatcagcgggttaaccttaccatgtgtaaggacgcacattaacttaccgaagagaactccggcagctgtaccgaatgcaaatgctataagaccaaggataacgatcttgattgtattccagttcaggaatgcttcagcacttgttgtagcacctacagatgtaccaagaagaataactacgatgtacatcagggcattggaagctgtctctgtcagctgtcttacaactccacactctttgaacaggttaccaagcatcaacataccaacaagtggagctgttgtaggaagaatcacacatacaacgattgtaacgataaccgggaagaggattctctcaagcttagaaaccgggcgaagctgatccatcttgatctttctttccttctctgttgtgagaagtttcatgatcggtggctggatgatcggcacaagtgacatataggagtatgctgctacggcgatcggtcccatgatagctgtctgctgcagtttacctgcaaggaagatagatgtcgggccgtcagctccaccgataatggagatagcagctgctgctttgtctgaaaatccaagagccatagctccaagataagctgcgaaaataccgaactgagctgctgcaccaagcaggaaactcttcgggtttgcgatcagcggaccaaagtctgtcatcgctccaactccaaggaagatcagagaaggaaggatggaccactcgtcaagctgataaaagtaatacagaagcccaccggttccattcgctgcatcctcagcatgaagcataatatccggatagatatttacaagcaacataccaaaggcaattggaacaagaagcagtggctcaaattcgtggcgaattgccagatagagaaacacgcaggcaacagcaatcatgatcaggttaccaaatgtaagattcatgaacgctgtctgttctacgaggtttcccaatgtatttgaaatatattccatttgtaaaaacctcctggttcagttactagtttaatgtagcaagtacagctcctgattcaacagcatcacctactgccacatcaatgctggcaatagttcctgcctctggggcaacaactgggatctccatcttcattgcttcaatgataataactgtatctccagcctctaccttctgtccaacagatgtaggaacctggaatactttacctgctgctccagcttttacctggatgcttccagcgcctgctgccgctttcggtgctgctgccggagctgccggtgctgctgctctaggtgctgcaaccggtgctgctgccggtgcgcctgcaccattctcttctactgttacatcatatacatttccgtttactgtgattgtatagtttttcatctaattatcctcctgattaattccatctgtttgattttcttctcttaatagaacgaacaacaaatccatctgtagaagttccctctgctgctgcaattgctgctgcgattactgctacaagttctgcatcatcttctgctgcagctaccggtgctggagctgcctgtacaggtgcttccttcttctcttccactttcttatctttatttgccaacttctcctgaagtttcggaatgtatccaagcagataaataatgaatgaaatgaaaatcaatacaacgaatacagttcccataccaagtaccgtattcagaccggctttctcaaggatttctcctgttgaataatgagcagaaacatccatactctccatgttgcccttttcgtcaaaactgaagacgatgtctgcatctctgttttcatattttgcttcagatgtgagtgaaactccatcgttctttacttccattgtccaatcgccatgctcaacataagcaccacactcttcttctgctgcttcccaggagctgatcattgtaaggaagtcctctccatcaaccggaagtcctgcattcataagctgtgtgtcaagctgaagatcacgcatatcagaaaagctgtcaagctgctctgttgtcatcgcttcgaaattctgaacaacaaactcagcatactgttcaaatcttgtctgatcatattctgttgtctcagacttaccacatcctgtgaagctaagaacgagaatgaggataagtcctaataaactgatttttttcttcacttcgcctcacctcactaaaccgttccgtgtttcttagccggacggtcctctctctttgtgaacagcatctcaaatgctccgatcacatattttcttgtatctgccggctcgatgatcgcatcaacatatcctcttgctgctgctgaattcgggcttgactgaagttctttgtattcagctgctttctcattaagagtctcagcatctgcgtctgcgtacatgatctgtgctgcaagcttcgcatccatcattccgatctctgctgttggccatgcataaacaagatctgcaccaattgacttactgttcatagaaacgtaagcacttccgaatgccttaccaacgattacatttaccttcggtactgtagcgttagcaaatgcatatgtcagttttgcaactgcgcttgccatgttcttctctgactctactgtagcagcaaatcctgttacatttgtcagtgtaagaaccgggattgagaatgcatcacagaagtttacaaaatctgttgccttcttgcatccgtctactgtaagaacgctgtcgaactcagcctctacttcagcttctgcattgtatactttagagcggtttgcaacaacaccaactgtcattccgttcaggcggataaatcctgtaaccatctcttttgcgtagtctttctttgtctcaacaagaatctgattgtcagcaatctgtgccagtgcgattgctgtatcttctgatgcgttagcaatgtctgcgcagatacggttcaggtcatctgtgcattcctcataagacatatcatcttcattgtttgccggaagcatacatacaagatcacggatctgtccgaggatctctgcctctgcaccgattccgtctacaagacctgctgtcttgctctggtactcagcgcttgctgtgttacacttggaaatctcatttccttccagtgcatttggagaattaacgaaaagttttccgtcttttgcttccataaatgtgaaatctgtaagccccggaacaactgcaagaccgccgccgcacattccaaagattgctgtaacctgcggaatcacacctgatgcaagtgcctgtttgtgataaaggcttccaaatgcctcaagtgcatctgtagcttcctgaagtctgagtcctgcacagtcgatcagtccgatcaccggtgctcccatcttcatagccatatcatagattcttgcgatcttcttcgcatgcatctctccgagtgctccacccagaacgtcagcatcctggctgtatacataaaccaggttaccgtcaatcactccatatccagtgataacaccgtcagaaggagctgccttctcctgcaagttgaaagttgtgcttctagctgtaacagctccgccaatttcaacaaagcttccctcatcaagcagtgtggcaattcgtctgcttgctgagttttctgttgcattgtagctcatattttagccctccatacttataaaataattttaaaataaaccaaaatttctgcctattgtattatatactaggacgattaaaatttcaattcatattttccgcaaattgacatttttttcacaggacattgtttttgtcgatcaccttcctcttctctttctctcttaatcatctgtaattgttttccggattcataacacatgagatacatttatctattatgaatagacaagtgaggaagcagctttattgttgaggacacatgtaaggcaggagcgttccgaatacactttgttcagtatgttaataagagccagaacaggcaccacacacggtaactgttctggctcttatgttacatactttcaaagggatgaggtagagcgggccggtgtctgatgcaataaagctgtttcctcacgccctcattcgacataaagtatatatttcaatcaaatgaatcctgatcaacaattacagtctcttcgctattgctttaataaactcctcactattgagtactgtcggattctcgattgttgtgatcaaagcgaggtcttttgtcatctctcctgcttcgattgtgtcgattgttgctttctcaagtttatctgcgaagtccatcagatctttgttttcatccagctcgccgcgttttctgagggctcctgtccatgcgaagattgttgcaactgagtttgtagatgtctcttcacctttcaggtgcttataatagtgacgctgtacagttccatgagcagcttcatattcataatatccgtccggagaaacaagtacggatgtcatcatagcaagtgaaccgaatgcggaagataccatgtcgctcattacatctccatcgtagttcttacatgcccagatatatccaccttctgatttcataacacgggcaacagcatcatcgatcaatgtgtagaaatactcaattcctgcttctttgaactgatcagcatattctgcatcaaagatttcctggaagatatctttgaatgtatgatcatatttcttagaaattgtatcctttgttgcaaaccacagatcctgttttgtatccaaagcgtaggagaagcagcttcttgcaaagctttcgatggatttattgatattatgcattccctgtacgattcccggtccgtcaaactcatgaaccagttcttttgtctggcttccatcttctgctgtgtatacaagttcaacctttcccgctcccggaatcttcatctcggatcctttatatacatctccataagcatgtcttgcaattgtgattggtttcttccagttctttacacaaggctcaattccttttacaacgattggagcacggaacacagtaccatcaaggattgcacggattgttccgttcgggctcttccacatctcttttaagtcgtattcatccatacgtgctgcgttaggagtgattgttgcacactttactgcgactttgtatttctttgttgcaagtgcggaatcaactgttacctggtcatctgtctcgtttctgtgttccaggccgagatcataatattctgtcttgagatcaatatatggctcaagaagattatccttgatcatcttccagagaattcttgtcatctcatctccatccatctctaccagtggtgttgtcatcttaattttttccatcttttgcttcctcctgattatgtttttcttctattttctttagattctgcatgacatgaacaatatgttcctttgcaagctgttctgccagatccgggtttctgtccctgattgcctgaagaatcgctttatgctcctcaattgacttctcggctcttgccttcacattgattgaggattttcttgccatttgaacatatcggtgaaaatctgtgagaacatgacacaacatcctgcttccggaagcctcatataatatcgtatgaaaccttccgtctaatcctgttacttgttctttattgtatccattttctttcttcatctgaaattctgaaagtaaaatagtctcttctaattcttctaactggtcttctgtaatatgttccgccgcccatctggcgcacattccttccagatacttacgcatctgatagatatcccagatatccttctggctgattccggtaacataagcacctttattcggtacaatcgtcacaagaccttctaattcaagctgtcgtaacgcttcccttactggagttctgctgaccccgagttctttcccgatggtagcctctctgagttcatcctgttgtttgtatctgcctttgaggatatcttcacggagtctcttaaaaacacgtcctcccagagaacggtcctgatattcttccatgatttcctcctattctctttttgtatgattgtatacgattatacaaatattgtcaagatgatttcatgctgatatcattgcattaaaaatgtatccattttcgtgtaatacttttctatactatctgttcatttttatatgctttgtgccatatcttatttatcaacttattgtatacaaaaaggtggtctctcgcatagaaaaaccaccctgttcttttcgttataaattagctttcaaaatcagcttcgccaaattacacttcatttactttttatttgatcacacgcacaccaagtacatctgcgattgattccagtttacttacaacttcatcagaaacgcttccgtctacatcaattactgtatatgcatattctttcttgctcttatttgtcataagtgcgatattctgattctcctgtgcaagaagtgttgtaaactgaccgatcatattcggcacattgcggtgaagaattgtaattctgtctccgtcaacttttgttcccacgttgcaatccggataattaacggaatgtgtaatatttccgttttcaaggaaatcacggatctcagcaacagccatctgtgcacagttgtcttctgactcttctgtagatgctccaagatgcggaattacaattgcgccttttacacctgcaatttcttttgttgggaaatctgttacataacggtgtactttacctgctacaagtgcatcaacgatatcttcctgatttacaagaacatctctggcaaagttcagaatcacaacgccctctttcatcagactgattgcgttcttgtcgatcattccctttgtactgtcaagtgcaggtacatggattgtgatataatcacactctttatagatttcatctactgttgttgcgtgatggatacttctggaaagtctccaagcagaatctacggaaacatatgggtcatatccataaacttccattccaagatgtgttgctacattcgcaacaagaactccgattgctccaagtccgatcacaccaagtttctttccggaaagttctgttcctgcaaatgcttttttcttcttctcagcaatctttgcgatatctccatcttcctcgaattcctgcacccactgaattccaccaacgacatctctggctgcaagaagcattcctgcaatcacaagttcttttacaccattcgcatttgctccaggtgtattgaatacaacaattccttcctctgcacatttatcaagcggaatattattcactccggctcccgcacgagcgattgctttcaggttctttccgaattccatctcatgcatttttgcactgcggacaagaatcacgtcagcttcatccgcattttctgtctttacataattttcatccagtttattcatgccaacggcagaaattggattcaggcaatgatatttaaacatcttacagattctcctcttcaaatttcttcataaagtctacaagtgcaacaacaccctcatatggcattgcgttgtaaatgctggcacgcattccgcctacagttctatgtcctttcagattctcaaatccagcttcttttgcttccttaacgaattttgcatccagatctgcatcgcctgtcacgaatggtacattcataagagaacgatcttccgggacaacagttcctttgaacagtttgctctgatcaaggaaatcataaagaacttttgctttcttttcgttgcgttctttcattacttcaagtccgcccatcttcttaagccatttgaagactttaccacagatatagattccgtatgccggtggtgtattataaagagattttgcatctgcatgtgtcttatatgtaagcattgtaggtgttcccgggagaacatcctctgtgatcagatcttcacggatgattgcgatcactacaccagcaggtccgatatttttctgaactccaccataaatcattgcatattttgttacatctacaggttcggaaagaaaacaggaggagacatctgccacaagatcttttccttttgtgtttggcagtgttttaaattttgttccgtaaatagtgttgttttcacagatatatacgtagtctgcatcttctgaaatcggaagatcggagcagtctggaatgtatgaaaatgtcttatccgctgaggatgcaacaacatttacctttccatatttttctgcttccttagctgctttcttagcccactgtcctgtgacaatgtaatcagcaaccttattcttcatcaggttcatagggatcatagcaaactgctgtgacgctccgccctgaagaaacagtactttatagttatctggaatattcatcagatctctgagatcctgctcagcttctgtgataatttcctcgaaagctttggaacggtgactcatctccataacagacattcctgttcccttgtagtccagcatctctgctgccgcttccttcagtacttcttctggcagaaccgccggtcccgctgaaaaattatacactctactcatttttaattacctcctgttattgtgtatctatagaaactccgttttcacagattttctcacataaaaataaaatattcctttatttatcagccatacaactatgtagctgaaacttattatttttagttttcttttgctttcagatcctgctcatcaaatgcttcgctgatcggtgctcccggcgcaaccataggccataccttatcatcacagtcgatcatacaatcgatcagaaccggttttccacatgtcaatgctttcgcaaagcactctttaaactcctcctgtgttgtagctcgaagtcctactgctcccattgcttctgcaagcttcacatagtcaactgcatcacggagaactgtcgcagaatatctttcatcatagaaaagatcctgccattgacgaaccataccgagtacatggttattaactacaacctggataatcggaacatcatgtcttacagctgttgcgatctcattcatattcatacggaaacatccgtctccggcaatatttacaacaattttatccggacatcctgtcttcgcaccgattgctgctccaagaccatatcccattgttccaagaccacctgatgttaaaagtgttcttggtttcgtatatttataatactgtgctgcccacatctgatgctgtccgacttctgttgtgataattgcttctccatttgtctgacgataaatttcttctaccgcaaacggacccgtaagtacatccttatgatatgttaacggatatttcaccttgtaatctttaatcttattcatccattccggatgagactgctgtgggagatgctcatttattttcttcaggactgctttaatatcacctactaccccaagatcgatcatgacattcttatccatctctgccggatcaatgtcaatctgaagaatcttcgcatcttttgcaaatgttgcagtatttccggttacacgatcactgaatcttgctcctgttacgatcagaagatcacattcacttactccaaagttcgatgcctttgttccatgcattccaagcattccggtatatctctcatcagttcccgggaaagctcctttccccatcagagaatctgttaccggtgcatctaccttctgtgcaaattcataaagctctttgctcgcctcagaaagaacggctccaccacctacgaaaatatatggtctctgcgcttctttgatcatctcaacagccttcttgagatccgcttcctctgaatggattacctctcggttatatacacctggatattccttctcatactctgtaactttcgcagtaacatccttcggaatatcgatcagcaccggccccggtcttccagtcttagcaatacgaaaagcctttctgattgtttctgcaagctttgttacatctttaacgatataactgtattttgtgattggcatggttactccggcaatatcaatctcctgaaaactgtcttttccaagtaatgggacaccgacattacatgtaattgcaacaatcggtatagaatccatatatgctgttgcgattcctgttacaagatttgttgctcccggtccgcttgttgcaagacagacccccacttttcccgtagctctcgcatatccgtcagccgcatgggctgccccctgctcatgagaagtcaggatatgacggatctcatcacggtgtttataaagttcatcatatacatttaaaattgctccacccggatagccaaatacagtgtcaacgccttgttctttcagacattcgatcacgatttctgctccatttaactgcatgacgtactctcctcctggttctttattttattttgtcttcggtacttcgagaattgctccacggttacctgatgttaccatagaagcatatcttgcgaggtatcctgtcttaaccttaggttctcttggctgccattttgcttttcttgctgccagttcttcatccgatacatccagttcaagtttcaactctggaatattgatcttgataatatctccctcttctaccagtgcgatcggtccaccaactgctgcctccggtgatacgtgtccgatagaagcacctctggatgctccgctgaatcttccatctgtgataagagctactgtagacccaagtccgtatcctgcaatcgcagatgtagggttgagcatctctctcattccagggccgccttttggtccctcgtaacggattacaataacatctccaggattgatctttcctgtcttgattgcttctgtcgcttcttcatcactctcgaaaattcttgccggtccttcatgtacaagcatctcatcacatactgcagaacgttttacaacacttccatccggtgcaagatttcctttcaatacagcaagtccgcctgtctgagtatatgggttgtcgattggacggataacttccggattcttattctcacatccggcaatattctctcctactgtctttcctgttacagtcatgcagtctgtgtgaagaagtcccttcttattcagctcattcataactgcataaactccgcctgcttcgttcagatcttcaatataagtatgacctgccggtgcaagatgacaaaggtttggagtcttctcactgatcgcatttgcaaaatcaatctcaaaatccataccaatctcatgtgcgattgccggaaggtgaagcatgctgtttgtagagcatccaagtgccatatcaactgtaagtgcattgaggattgcgtcttctgtcataatatctcttggacggatattctttcttacaagctccatcacctgcatacctgcatgtttagcaagctggattcttgcagaataaacagctgggattgttccatttcctttcagtcccataccaagagcctctgtcagacagttcatactgtttgctgtatacataccggaacaagatccgcaagtcggacatgctttattctcaaattcgcaaatatcttcgtcgttcatctttcctgctgcataagaacctactgcctcaaacatactggaaagacttgttttgcttccctttacatgtcctgcaagcatcggtcctccgcttacaaatactgtcggtacattcacacgggcagctgccatcagaagtcccggtacattcttgtcacagtttgggatcattacaagcccgtcaaactgatgagccatagcaagagcttctgtagaatctgcgatcaagtctcttgttacgagagaatatttcataccgatatgtcccatagcaataccatcacagacagcaattgcaggaaccatgattggtgttcctccggccattgccacgccaagtttaacggcttctgtgatcttatccagattcatgtgtcccggtacaatctcattataagaacttacaacaccaatcagtggacgatctaattcctcctctgtaagtcccagtgcattaaacagagaacgatgtggtgcctgctgaattccttttttaactgtatcacttctcattttaaaatcctctctttctgtaacaactgctaattacttaatatattcgcagatcttatctcccatctgggctgttccaatctgttcttttccttcagacataatgtcgattgtacgatatccgtcttttaatactgctgcaacagcattttcaatcgcatctgcctctttatcaagatcaaatgaaaatctcagcatcattgctgctgaaagaattgttgcgatcgggtttgcgattccctttccggcgatatccggtgctgaaccgccacttggttcatacagaccgaattttgtatcgttcagacttgcacttgcaagcattccgatagaacctgtcaccatacttgcttcatcggataaaatatctccaaacatgttctctgtcaggacaacgtcaaactgtgccggatccttcacaagctgcattgcacagttgtcaacaagcatatgttctaatgtaacttccggatagtccttcgctacttcctcaacaacttttctccaaagtctggaagagtcaagtacattcgctttgtcaacacttgtgaccttcttgtttctcttcattgcaatatcaaaaccacgttttgcaattctgcggatttcattttcattataagtaagttcgtcttttgcggtaaggacaccatcaatctcttctgtgcttcgttttccgaaataaagaccgcctgtcaattcacgcatgatcattagatcaaatcctctgtccgcgatctctttcttcagtggacacgcacctttcagttcatcgtagagaactgccggccttaagtttgcaaaaagattaagtccctttctaagctgcaacagccccgcttccggacgttttgatggttcgagctgataccatggagaagtcttcgcatcaccaccaatggaacccataagaactgcatcactgtcctttgccagctgaagagtctcttctgtaagcggcaccccgttcacatcaattgatgctcctcccatcagaagctgcgtgtaggaaatagaatgaccataaactttcgctgtctgatccagcaccttcattgcctcatctacgatctcaggaccgattccatctcctttgattactccaattttcatttccatatctaactcatccttccaaaatgtaaaaatctttttttatcataccgcatttttttcgctgtttcaagtatttcgagtgaaaaaatagagggcactctgtatttttatcgaaaattgcacttttccaggcacattttctataaagtaaaagaccagaaagagtcacactccttccggtctcatttttcctcttattcagcacctggcttctcaatctgagcaattgcagccttctgcataggaatacggcaattcttattattaccgaactcaacaatcacgtcatcatcagtaatatcgatgataacaccataaaatccacttgtagtaagcgctgtatctccaatctccatatcagcgagcattgcctggattctcttctgctcctttttctgaggacgcatcagaagaaaccacataccaccgaggataacagcataaacaacaataatacctactgttcccattgaaatttcctcctgactatttcttaaacctatctgtccagtactttttaagtactaatagacaataaatctattatacacaaaaacagcttctaattcaagtgtttttctaatattccatgtatatttaagtttatttttatacattttctataaaattagagcagaaacactatttctgttccatgccttccaattttctcttcttgtatgcctggaattcccctgcatcaatcgcatcacggatttcttccatcattgtgttatagaaatacagattatgaagtacacacagacgcattccgagcatctcttttgctttcaaaagatgtctgatgtacgctctgctgtagcttctacatgccggacagttacatccttcctcgatcggacggtcatccagttcatacttggcattaaacagattcatctttccatgatttgtatatacatgcccatgacgtccgtttcttgacggatatacacagtcaaagaaatccactcctcgatctactgcctccagaatattagccggtgtaccaacacccatcagataagtcggcttgttttccggaagatgcggaaccactgcatcaagaatacggtacatctcttcgtggctctctcctactgcaagtccacccactgcataaccatccagattcagttctgcgatctgctgtgcatgtgcaattcggatatcctcataaattccaccctgattaattccaaacagcatctgatgtggattgatcgtatccggcagagaattcagtcttgtcatctcctccttacagcgcttcagccagcgcgtcgtacgctctacagaattcgtcatatactttctgtctgccacactggacgggcactcatcaaatgccatcgcaatcgtggatgcaagattagactgaatctgcatgctctgttccggtcccataaatatcttatgaccatcaatatgtgaattaaaatgaactccttcttccttgatctttctcaactttgcaagggaaaatacctgaaatccgccggaatctgtcagaatcggtttatcccagttcataaatttatgaagtcctccgagtttcttcacaacttcatctcccggacgaacatgaagatgatatgtattagacaactccacctgcgtcttaatccctctcagatcatctgtagatactgctcctttgattgctgctgctgttccaacattcataaaaaccggagtttcaattactccgtgaactgttgtaaagcgtcctcttttcgcacgcccgtccttctttaaaagttcatacataagcttttttcctcttcttttctttttggttttcagactatcaaagcctgccaatagttatggcaggctatatttatctttgcatttcctttaattatgtattataacaggtgttcccatactaagcattccataaagacttgccgcctggtctaatggcatattgatacatccatgagaaccatttgtctgataacggcttcctccaaagcttggattccatgtcgcatcgtggaatccgactcctgtccaggtcacacgcatccagtatgctaccggcgtctgataaattggctttcctgttgaaggatctattgttcctgtaagaactttatccctcttcatctcaaggatcgaataaactcctgtcggtgtctctcgctccggtgtaggaagtcctgtaacaacgtctgtctctaattgtacagctccgttaaccacataccacatgtgctgagccgggatatctacttccagataagtcgttccccaatcctgcgcgtcatgtgtagctgccgtctgtgcataagcaggttctttctcagcaacctcgcctttcttaatgctgtcaacaagtgcagtcagttctgctgcctcgtcaactgaccagccgtaagtacctcccgaaacgtctactgtttttcctcccggagttgtaatacttcttgtcgttcctaccgtatcataagtctttccaaattcacgaagccactctttcacctttgactcatcaagcgttgcattcatattatcatcatatgttacccagcctgaaatcagatccttgtttacaaccacattctggtttgtcatcttataagtgatgctggctttcagataattgttcatcgcatcacaggctttctgaacttccggagactctgaagtgtacttcggcatagcatagcacttctcatccatcatatttaattcactcttgaagtttgtgatcgcatccttcacttttgccttaaatgtatccacatctactttcgtaccataaacttcaggttcaacaacaaaactgttcccatcatactttggataagcagactgtggatctgtctgctcctgattcagagcctgtacggattcaatctttgactccaacgccgcttcatcatatccgacctcaattgtgacttcagctgaactttttgagaaaaatgcctgtggccacaaaaatgcattctgtttcttcagtgcatcctctatatctgaattttccttatatacaagtgaaatatccgatccttcgattgcatctgtcatattattctgttctacaattgtcagtttataatctgccacctgatttttaatataattctctaccgccgccgcattcttaccagaaaagttctttccgttaatctgcgtattaatatagaaatgactcataaaaaagactgatattgcaagataaacaataacaaggccagcaataataccaccgataatcatccagatcttcttgtcaattgtcttctgctttttctttcttcttactttgcgtcttctaactactttcttttcagacattctaattctcaccctcgtcttttggattaatccttctttttgattcagacttcattatattacgctttttccaaaatgtacaccccaaactttcatgaaatacgcacaaattaaactgatgttgaattgttaattcgaacgaaatcttttagaaatacttttgtaatttatttttgaaattctgttgaattctacaacattttaacttgcgtacacctctttcttcctatataattgcactgtaccctcagttatgaaacacaacaatatgtttcgtatctgggggtatgatacggaaaagaatgatatatgatatacaaaaaagcattttatacgcactttttgtataccttattgatacaaacgaaaggagttttagatatattatgagcggttcaacatttggcactttatttcgagtcactacctggggcgagtcccacggtcccggagttggtgtagttatagatggatgccctgccggcatccctttatctgaacaggatattcaacaatttttagatcgccgcaaaccgggacagagtaaatatacaacgaagcggaatgaatctgactctgtcgagattctgtccggagtctttgaaggaactacaaccggaactcctatttctcttctcgtgcggaatcaggatcagcgttccagagattatgggaatattgcgacatcttatcgtccgggacacgcagattactgctttgatcagaaatatggtttccgtgattaccgtggcggtggacgttcttccggccgtgagacgatcggccgtgttgctgccggtgcaattgcttcaaaattacttggcgaattagggattgtgctgacaacttatgcaaaatccatcggtcctgtcactgtagatgaagctgattatgattttactgagattacaaataacagtttttatctgccgaataaagatgctgccaaaaaagctgctgaatatgtttctactcttatggagcagatggattcctgcggcggtctaattgaatgccgtgttgaccatcttccagccggtctcggtgaaccggtctttgataaactggacgctttacttgcacaggcaatcatgtctatcggagccgtaaaaggtgtcgaaatcggcgatggctttcagagtgcctcttctaccggaagcacaaacaatgatcctttctgcatgcaacaaggacaggttatgaaaacttcgaatcattccggcggaactttgggtggcatgagcgatggttctcaattaatcttaagagctgcgatcaagccaacaccttcgatctctcagatgcagcacactgtaactaattcaggcgaagaaatcgaactgtctattcacggacgtcatgatccaatcatcgtaccgcgcgcagttgttgttgtggaagcaatgaccgcactcactctcgctgatctgctcttgcgtaatgcagtcagccggatgaatcagataaaacaattatatacggaggataaaaatgtctaataaactgatcgatatcatagatattaccaaatcctatgacgaaaatgtaattctggataaattaaatctttatatccgtgagaacgaatttctcacactccttggtcctagtggatgtggaaaaacaacactattacgtattctcggtggatttgagacaccggactccggtaatattatttttgatggaaaaaatatcaacagtcttccgccaaaccgtcgtcagctgaataccgtattccagaaatatgccctcttctctcatatgtccattgcagaaaatattgcttttggattgaggatcaaaggtaaatctaaaggttatatccgcgataaaattcattatgccttaaaacttgtcaatctggaaggatacggggatcgttctcctgactccttaagtggtggtcagcagcagcgaatcgcaatcgcacgtgcgattgtaaatgaaccaaaggttcttcttcttgatgaaccacttggtgcattggatttaaaacttcgccaggatatgcaatatgagctgatccgattaaaaaatgaacttggaattacatttgtctatgtaacgcacgatcaggaagaagctcttacaatgtctgatacgattgtcgttatgaatcagggatacatccagcagatcggcaccccggaagatatttataacgaaccgcaaaatgcattcgtagctgattttatcggagacagcaatattattgctgcaaccatgctcgaagacaaagttgtccgtatgctcggtgctgtctggaaatgtgtagacgtaggatttggtcataaccgtccagtcgatgctgtaatccgtccggaagatattgatcttgtcaagcctggagaaggtgttattgacggaattgtaacaaacttgatctttaagggcgttcactacgagatggaaattcttgccaacaactatgaacttctcgtacatagcacagatatgttccctgtaggaactgaagtcggaatcaaagtggatccttttgacatccagattatgaaaaaaccagaatctgaagatgaggaggcacctgctgttgaagaatagaaaattacttgccggaccttatcttttctggtccgtgtcatttattattatcccactgctcatgatcttttattatggtctgacagataaagaagggacttttacctggtctaacattgcaatgatggcttcgcctgagaatctgaaagcactcggacttgcactgctgctttccctggtcagcacactgatctgcctggttcttgcatatcctcttgcaatgattttatctgaaaaaaacatgaaccagacaagtcttatcgtactgatttttattcttcctatgtggatgaactttcttctgcgtacactcgcctggcagacactgcttgaaaaaaatggtgtgatcaacagcattcttgcattcttccatctgccacagcagtctatcatcaatacaccgggggctattgtattaggtatggtatataacttcctgccttttatggtgcttcccatttataatgtattggcaaagattgataaagatgtcatttacgcagcaagagatcttggagccaatgaatttcagacatttacacagatcatctttcctttgagcattcctggaattatcagtggtatcactatggtcttcgtacctgcgctgacgacctttgttatttccgaccttctcggtggaagcaaaattcttctgattggaaacgtgatcgagcaggaattcaaacagggaagcaactggcataccggttccggtttatccctggtgctgatgatcttcatcatcgcaagtatggctgtgatcgccaaatatgataaaaacggggaggggacagcattttaatgaaaactatagcaaaaaagatctatctggcactgatctgcattattctgtatgcaccgatcgtgactttgatggtcctctcctttaacaatactaaaacacgttccaaatggggcggattcaccggaaaatggtatgtgtctcttttccaaaacaaagagattatgaatgcattgtacacaacactgatcattgcattgctctctgcactgattgcaacattgatcggtacttgtgccgcacttggcatgcaggcaatgaattcaagaatgcgtaccctttttatgggagttacaaacatccctatgctgaatgccgatatcgtaacaggagtatccctgatgcttctcttcattgcattccgcttcacacttggattcaaaacaatccttttggcacacattacattcaacataccttatgtcatcttaagtgtaatgccaaaattaaaacagacgaaccgtagaacttatgaagctgcactggaccttggagcttctccggcctatgcattcttcaaagtagtacttccagatattatgcctggaattttctccggtttcctgctttcctttacaatgtctctggatgactttgtgatcacgcatttcacaaaaggtcctggtattgatacactctcaaccaagatttacagtgaagtccgtaaaggaatcaagcctgaaatgtatgcactttcaaccattatgtttgttacagtgctgttacttttgatcctgatcaatatgtcacctgccgaaaagaaaaaagtagtaaaaataaagcgtttcggaaaagcacaaaaatttggaagatttttcttccaacgtctagtacctgttgctatggctgtgcttattatcatcggtggttttatttatggaaagaacgatgttatctcctcacaaggccaggtaattgtttataactggggtgattatattgatcctgatgttattgatatgtttgaagaagaaaccggtattgatgtagtatatgaagaatttgagacaaacgagatcatgtatccaaaaattcagtcgggagcgattgcatacgatgtcgtatgtccatctgattatatgattcagagaatgattgagaataatcttttggaagagattaattatgacaacatcccaaatttgaaatatatcgatcagaaatatatggatcttgccaaaggatttgatcctgataataaatattctatcccttatctttgggggactgtcggaatcctttataacaagaaaatggtagatgaaccaattgacagctggggtgttctgtgggatgaaaaatataaagatagcatccttatgcaggacagtgtaagagatgcctttggtgtcgctttaaaatacctgggctattcattaaattcaacagacttagatgaacttcaggctgccaaaaatctgctgattgaacagaaacctcttgtgcaggcatatgttatcgaccaggtacgtgataaaatgattggaaacgaagcagctctcggagtaatttattccggcgaagcactctactgccagcaggagaatccaaatctcgattacgtgattcctaaggaaggttctaatctttggattgattcctgggttattccaaaaaatgcagagaataaggaacatgcagaagaattcatcaacttcctctgtagaccggatattgcaaaaatgaattttgaatacatcacttactccatccctaactctgccgggcaggcattgatcgaggatgactacatgagaaacaacacgattgcattccctgatattgatcagttgaaaaactgtgagacgtttaatttcctcggagatgaaaatgaggcgctgtataacgaattgtggagagaagtgaagtcaaaataaatttgtatttagcaataagaatattggctggttcaaaatttaaatgaatgaagaagggcgtgtttggacggtctcttgcaacgatatgcagggcccgttccctcagccttttgagggattgtaacaaagaagcgagatatgcaccgtgtgtggtttgtatctcgcttcttctaacaatccgcgcaaaatgtcttcgtacactcttacgccaaatgcatatcttatgcaagagtccatccaaacactcaggttcatcagatcagaaatgatttgaatacagattattcttatcgaaatgcaaatcagaagggatatgaaaatggaacgctattgactaaaatttacaaattggcacaagttgtgtcatatagtcgatagcgttcccttttttacttccgtccagaattctgtatttaagtgttgaattcgttccacagcaatcacttacgtgcaacaaatcaaaacttgtatgaagtctttcagatttgtcccgttaaggcaaacacttctgtttggaataaagaagcgaggatggtgctatattgttgaggacacatgtaaggcaggagcgttccgaatacaccttgttcagtatgttagtaagagccagacaggcaccactcacggtaactgttctggctcttacgttacatactttcaaggggatgaggtagagcgggccggtgtccgatgcaatatagcatcatccttgcggccttattcaccaccaaatcctttgcttcaatatggagaatcagacagacaaatacaaatttataccacaaaattcatcttctgatcgtcgtactgcacggaaaatccttttccttcgaggtactcttctaccacctgatacatctcatcatatcgtccttcgcaggcacaattaccaagtggttcgacccagaaggattgccttccacaagtgtccctgagatgaattcggaaattcagacctttatctttaagaattccatttaattctatcacatcattaaaagatacataactcattttaattctcctcttctttacctaataaaatgtgttgcaattcgttcttctttctccggaagtccaaactgttctttacccaaggcaatactcttcataagaaatgtcatgtttctggcgaggactctcatagtctgctttccttctccatcctgctctacttctcctggtattcttccatgaatactattccaatactgactggaagcaactggcattccagaaattgtaaagtatttgtttaactcgtcaaatgttgctgaacatccaccgcgccttgcacagacaacacttgctcctactttcatagtcttatcaaatggtgtgctgtagaacaggcggtcaagacaggcgatcaatgttgcatttgcggatgcataatagactggacttgcgataaccagtccgtctgctttctcgaatttcaaagccagttcgttaactacatcatcataaacacatttttgcttggaagcacatcctccacaggcaacacatccacggacaggtttatttccaacaactactgtctctacttctactccattttcctgaaaaatcttttccatttcttttagtcctacactagtatttccgtttgctcttggacttccattaatcataagtactcttaatttttctgccattgtttctcctcctacaaacattattgtcttatcttcaaagttctcagatactccttttgttccggcatgatccgatagctttcgattgccttctggattgtcttattatgtgtccatacgtccatcttctgttcttctagaaatggaagaacctgatcatactttttggcaagtgctgttgcgaaataccatgccctggccatatttacataatactcttctgaacggattgcggcaaccttccccggatattctaacttaaattcttcttccagataatagcgcatcagcatattgattccaaatcggatcgtatatatatgctctgattccagccatcgatctatctttttgatataagaattcagatgattcttcactgttctgactgccagaagatcacaggttgcccagttatctatatggggcagaaagcgctccagttcttctatacagagttcataatctttaatctgctcgatcagaagcccatgcagattattctcttcataatattgatgtggcaggatcttaagaaactgcttcgcctcttctgtcttcccgaatttctttgcataagttcgaagtacagggactctcactcctatcactgattctttctctactgttggcatcagttttgcgtgaaaatctcgatattttagatcctgcattgtaaaaaggtcctgctgcacttttggtattacttcttttggagtcatctttattcacctgctttctgttaatttgcagtataacacacactttatgccactgcaagtatatatagaacaaatgttcttctgtattttatttcttttttttgctatacttatctacgtataaagttgctgctcacacccactatgaacagtaactaaaaattctctgactcttttgctgttactactcacactatatattaccagcaacacagattcgtcagagaatataagggagataaaaatatgctgacagtaatgaaatttggcggaagctccgtggccgatttggagcacatccgcaacgtagcaaaccgctgtatcgcaaagcagcgcgaaggcagccaggttgttgttgtcctgtctgctatgggaaagactacagataatctgatcgcaacagcaaaacagatcacagagcagccttcccgcagggaattagatatgcttctcacaaccggtgaacaggtttctgtatccttaatggcaatgactctgatttccatgggcgtcagtgcagtgtcactgaatgcatggcaggttccaatgcatacaacttcaaattatcaaaatgcacgattcaagagaattgattccgagcgtatccgtaaagagcttgatgcgaacaagatcgtcatcgtaaccggattccagggaatcaataagtatgaagatatcacaactcttggccgcggcggctctgacacaacagcggttgctcttgctgctgaactccatgccgatgtctgtgaaatttacacagatgtagacggagtatataccgccgatccacgcgttgttccaaacgctcataaaatgacggagatcacttatgatgagatgcttgagatggcctctcttggtgcgaaagtccttcacagcagatgtgtagaaattgcgaaaaaatacggtgtagaacttctggtatgttctagcttaaaccacaattcaggaacaattgtaagggagaaaacgaaaatggaaaaaatgttaatcagtggtgtagcagccgataaaaatgtagccaaaatccgtgttgccggtctcgggaacgagcctaacagcacattccgtcttttaaatcttttagataagaataaactgaacattgacgtcatgatccagtctcttggtaaagacggtacaaaatctgtatccttcactgttacaaaatcggacatgctccgtgctttggatctgttaaatgaaaacaaagactatcttggcattaagaaactggattctgatgaaaatgttgccaaagtttctgtcattggtgccggtattcgttctcattcaggtgttgctgcaaagatgttcggtgcactcgcaagtattgatgtcaacacagagatggttactacatctgagattcgcatcactgctctgatcgatgaagcctatgcagatcttgcagtacgtaaactgcatgaaactttctttgattgattctttatacagaataattgaccagctacataatcaacttaatcgattgcaaactataagaatgtaatgtaaaaagtaaaacagaatcaagcgacagtaaggattaataattcccttctgccgcttgatttttatcttatttttgttctgaataattacatttgttttttatttttcactgcacattatgcttcttcctctaacgacgtttttccgcgcaaacgtctgtaatagaatcttccttttccaagaagaatcgtaagataacgaagtaccggctctgttgcgattgcaaatacaacaaaaagcatgatacactttgttgtcattccgctaatcgcaaacagctgattcaaatagatactgcagaacaataatcctgcgatacatccgccaagaatccctgcacgaagcttattcatcggtgcactgatcttatagaggatcataaatcctacaattgccagaagcatcgttgctgctgttgagatatcctgctctcctactccaaatgtctttccaaagacaaccagtgccccaaccgccaatgcatctgtaagtgctgccgggagtgctttcaggaatacattcgtcaggaaatgtcctttaatgatattcttattcggctcaagtgcaaggaagaatgccggaataccgattgtaaacatactgatcagtgatacctgtgatggttccagtggataagtaaacataaatactactgagaaaagactcagcaggaaagagaatatattcttaaccaggaacaggctcgccgaacgctggatattattgactactcttcttccttctaatacaacctgcggcatacaagagaaatctgactccagaagtacgatttgagaagcctgtgccgctgcctcgcttcctgatgccattgcaatactgcagtctgcatccttcaaagcaaggacatcatttactccatctcctgtcatagcaactgttttcccagcctctttaagtgcctgaacaaactgtcgtttctggtttggagttacacgtccaaacactgtcttctcaagaattgctttcttaatatcttcttctgtctcaagacttgatgcatccacataattctcagcatttttaatacctgctgtttttgcaactttggaaactgtaaccggattatctccggaaataactttcacttcaactccctgctctgcaaagtactggaatgtttcttttgccgcctcacggattggattcgcaagtaagatatagcccaacggtgttaccggctctgccagtgcttttccatcaatctccgctgcataagtaccaaacacaagaacacgggcacctgtagatgcaagctctgtgattttttccttatgttgctcgtaatcatccagaagtacaaattccggcgctccaagaacatatgtcttatcttcaaatgtagcactgctgtactttgtcgcagatgaaaatcctgtcttggaaattgcttttgcgcctgaagaatgtgtaaaatattctttcattgcagccattgtgatattatcgtttgtcatagctgaaacaaaatctccgaccataagacgaagagattccatcttttccgtatcgtactgctccgttggaataagttcctgtaccttcatcgtattttctgtgatcgtaccagtcttatctacacaaagtacatcaacacgcgcaagtgtctctatacatttcatatcatgaagcaatactttctgctgtgcaagtcggattgaactgacagcaagtgcaacgcttgcaagaaggtaaagtccctccggaatcattccgatcacagccgctaccattgacgtaatacttgaatggaatgatgcattctggaataccagagactgtgcaacgagtatgattccaatcggaatgattgccacaccgacgcatttaaccaatttatccagcgagcggatcatctctgaccgctcaccattctgcatttcttttgcttccagtgtaagctttgaaatataagaatcttcaccgactttatcaagtcttgcatgacattgaccggaaataataaaacttcctgacatcagctgatctccggcatgttttgtaatctcatcagactcgcctgtcagcagagattcatttacctgtacctcacctgcacaaacctgtgcatccgcacatacctgcgcgccggctttaaatatgacaatatcatcaactaccaactcttctgcatcaatcaacgatcttttaccatctcgcactacagtcgctttcggtgcatttagcatggtcagattatccagcacttttttggcacgcacttcctgtataataccgatcaacgtatttgcaataataaccggaagaaaggtcagatcccggaaggatccaaccagacataacaaaatagccagaacaagaaagattaagttaaagtaagtaaatacattctcatgtacaatctctttcgttgtcttcgacggaggatcgactgccctgtttacccagccatgaagtctgtgctcctgcacctgctgtgctgtcaatccgactttataatccggattgtaacgggttgtcggtatccgcttctctatttcttctttaatctctgttttcttgtttctgcttcttgccatctgttacttcccttctgcttcttccaacgtctccgttctcgtcaaaatctgcataaattcttctcctgtaattgtttctttctcatacaggtattttgcaagctcatgaagtttcttctggtttttctccaaaagatccatcgctgtatcatatccgtgttttacggtatctacaaccatctgatcaatatctgctgctgtctgcggtgaacaacttaaactgctgtctcctcccagatatggattgttctgcgtctcaagagcaaccataccaaaccggtcactcattccataacgcgtgatcattgctcttgcaagctttgttgcctgctcgatatcattcgatgcacctgttgtgatagaattaaaaatcagtttttctgcgcatcttcctccggtcagtgtcgcgatcttgttgatcagctcttcctgtgtcatcagattacgttcttctgactctacctgcattgtatatcccaaagcacctgatgtacgcggaatgatcgtaatctttgtaaccggtgctgaattcgtctgtaatgctgctaccaacgcatgaccgatctcatgataagaaacaattaatttttccttggaagaaagtacctgattcttcttctgatatccggcgataacagtttcaatactttcttcaagatctgcctgcgttacatatttacggttctctctgactgcgcgcagtgccgcttcatttaccatatttgcaagctctgctcctgatgctcctgatgcggctcttgcgattgcattaaagtcaatgtcatctccaagtcttactttcttcgcgtgaactttcagaatctcctcacgtcctttaagatccggcagttccaccggaatacggcggtcaaatcttcccggacgaagaagtgccggatcaagactgtccggtcggttcgttgcggcaaggatcacaacacccttagatgcatcgaacccatccatctctgtcagcaactggttcaatgtctgctcacgctcatcatttccaccatatcctgcgttatctctctttttaccgattgtatcaatctcatcaataaatacaatacaaggtgctttttcattcgcctgtttgaaaagatcacgtactttagaggctcccatgccaacaaacatctctacaaattctgaaccagagattgagaaaaatggtacatttgcctctcctgcaactgcttttgcaagcaaagttttaccggttcccggaggtcctacaagaagtgctcctttcggacatactgcaccgatctccgtatatttctgcgggttatgaagaaaatccacaatctctgtcagcagttccttcgcttcatcttctccggctacatcctggaaagtgattcctgttgtagattccacataaaccttcgcgttgctctttccgaactgcatgaacggatttcctgctgcacctccacccatcttggccatcatcttctttgcaagccactgtcctaatgcccagaagatcaaaagtggtaaaatccatacaaggaaaaagctaagaagcggattcatctcctgctgtgcgactcttccgaattcacatcccgcatcttccagacgatttaccagatttggatcatcaaacgttgttgtctcataatatttcggttccttgctattatctgtaaaataaatagtgtctccattcaactctacttttgatacttcttttccctcgaccatagtaagaaaagttccataatcgacttctttcaccttattctttcctagaatattcggaaaaagaaatgtgttaagaagcacgagaataatcaaagcaatcaaatagtaaaagattaatggcttctttggtttctcgactttcttcatactgttgttcctcctattttctaaattttgcacgaactgcctttatcatctgtataatcggaagattcaatgctgcaagaccatacacagtaagtaactgcgataatgtcagtgtctgcactttaaagattttatgcagtccaggaacagtcacaacaagcgtgatcagaatcattccaattacaaaagcaccgatcaggtaaatgttattaaagactctttttgtaaatacaaccggacgatttgatttacagttaaacccatggaacaatcttgaacagcaaagtgttgcaaatgccattgtacttgcaagtagtgcattaccgtctttgtatccaattgtaaatgcaatcatgaccatggtacagattgataatccttccagtccgatattgatcaaaaagtctttcgttaaaatggattcatttatcggtcgtggcttttctttcatcacatttttcgaatgtggttccaatccaagagcaattgccggaagactgtctgtcagcagattaatgaacaacagatgaaccggtgcgaacggtaccggaagtgccatcagtgaagcataaagcactgccaggattgctccaaaatttcccgaaagcagaaactgaatggatgctttaatattgcgatatatatttcttccattctctactgctttaataatagtcgcaaaattgtcatctgtcaaaaccattgctgcagcgtcttttgacacttcgcttccggtaattcccatcgccactcctatgtctgcctgtttcagtgccggagcgtcattcacaccatctcctgtcatggatacaatgtttcctttctcctgccatgcacgcacaatacggatcttgtgttcaggagagactctggcgtaaacagaaatcccttccacaaagtctttcagttcttcatcggacattttgtcaatctctgcaccctcacaggcttcggattcattttcaagaattccgattctctttgcaatggcagcagctgtcaccttatgatctcctgtaatcataatcggacggattcctgcacatttacactcttctacagcagcttttgactcttctctcggcggatccatcattgcgatcagtcccaggaatatcagatgatcttcatcctccagcgtaagttccgtctcatctgatacttctttataagcaaatgcaagaactcgtaatccctctcttgagtatttctgattctgctcttcgattactcttcttgtctcttctgtgatctcatgagtctcccctttcatctcaacccagtctgtccggttcaaaagaacatcaactgctcctttgacaatcatcgttggcactccgtttaatgaatgctttgttgccatcatcttacggtcgctatcgaatggattctcactttctcttggatactttactctgacttcttccgggtcaagaccaagactgcttcctaaattaatcaatgctgtctctgtcgggtctccaatctctacgccgtcaatattcgtagagtcattacaaagaatactgctgataaggagtctgctctgagacggatcccggagatcgatcttgtctgtggaaacgctctggccatctacataataatgttctactgtcatcttattctgtgtcagggttccggttttatctgaacagataatggatacactccccaatccttccactgcctgcagctttcgaacaattgcatgctctttcgccattttctgcgttccaaaagaaagaacaattgtaacgattgaactcaatgcttccggaattgctgcaacggcaagcgcaactgcaaaaagaaatgcatttccaatattctcaccgcgaaaaacactgattccaaacaaaatcgcacagaatacaagaattaaaattgataatttctgcccaaactgatccagattcacctgcaatggagtcttcttctcagaggtagtcttcagaagacttgcaattttaccaacttctgtattcataccaatctctgtaactacaaaagatcctcttccatacgtaagaaagcttccggaatataccatattaatacggtctccaagaggaacttcgtcctgttcaatcacatctgtcgtcttctcgacaccaagactctctcccgtcaatgcactttcgtcaaccttcatgctcgcacattcgagaatacgtccatctgcaggaatatagtctcccgcctctaacataataatgtctccaacagtaacttctgcagacggaattgggacaaccactccatcacgaaggacttttgcttccggaccggataatttcttcaaacttgccagagatgcctctgcctttactgtctgcacagttcccagaattgcattcattgtgatcacgataacaataacagctgcgctctcaatatctcccataaatcctgatgcgatcgctgctataataaggatgatcaccagaaaatccttatattgctccaaaaaaatctgaactgttgtcttcttttttccttccgtcagttcattcggtccgtatttcttttgattttcactgacctgttcttttgttaatggttcttccgagccattcacttctcttaaaacttcttctcccgataattgataatatgctttcactgcccttcctcctaactggttattggttattgttcactcttcctttgtgacccataatcctgattcatctgcagtgcgaataaaaaaagagacaattattgcaccgctttttacatgcaataaaagtctcactatttcatcacgatccggatggacttcttccatcgtattgacggctcgcaaacgctacttaaagcgccagttactcccttttattaaaataaactatactcatttttcctgataatgtcaataaactttattttctttttaggaaattatccattttttctcttgcagctctcgtttcatccgccatcagtttatttcctattttccgataatggtgtactgaatatatggaggtatgtcccagtaacttggctatcatccagtcatccacgtgcatttctgtcaatttctttccatagcagtgtctaaagatatgagttccaaacttcagaaattcaccattatcatcccggatatcttcttggcgtatcattttcataatctgattttgaatcatgctatattgatagggtttagtcggatcatctttttttacaaaaatataagttgtttctccataccgttcctttgtataatcaattgctttcataatcagttgtgccacttcttcactgatggatttttcataagtgactgactttacctggtcaatccttataaaatatcggttgttccgcatgcttaagcaatccgtttttaatgtcagcgtgtctgaaattctcgttcccagcaactggtggataatcaatgccctgcatatctgctcatccattttgaaaatgtgttcgtttaatcttttgatttccgcatctgaataaaatttaaatacatgtcttggtgtgcttgggaagtcattactcagaaataattcgctcatgcactgccgttcatataaattcccaacatcttctatcacccttcgcagtgcatacaagtcagatctgtaatttttccgttcatgcacttccgttttcagatatattagatattcttctatatgcatccgttccaaatcttgtagcgattgaatatcccgatatttctgtttaagaaattttgaaaaccgctttacagctgtcatttcactgtggattgttcctaatggggagtatttcaaatgcataaaaatcactttttttacttcttcccggatatcaggttgtacaattccagtaaaattaagcgtttccgtattcttgatcggatttccatgaataggaaaatcaaaatttttaagcgtccatatatctttttcctgctcgtctcggtcatcctcttcttccaaaaatttcaagattttcttcatatgctttacaatgctaggcgtttcaattcctaccttgtcatatgctggccgatattttttacttgataaggcataccctttttccaacatccatccttttaacatgcggatgattttttcctctttcccatataaattcttccaaccttccagcgatctcttcagatggcaacccttccagattaaaataccgttctggtttgatacgcattttctgaagctgctcttcggatgctgatttgtaacaatccatctcatatatgtaaattctttttttcattttctatcaccacgtttcttaactttaatggtagaagctaaatcattttccgatttcttaaagtaagtatcacttgctttttcaattcttcttggcatgaagtccacatactgttttgtcatctcttcggaaaagtgtcctaaataatcccggattgtctgtatagaaacatcctcatcataaaattgggttgccaacgtatgtctataatcatgggttttgaagatataactgccatctacaatttcattcttatcgcagtattgctgaaactcttgtcggaatgttgtccccctgtacgctccaccatccttccctttaaagatataatctttcggacgaatatgttccatctctatatatctacgcatgattctatacaacacaatccggatatttgcttttgcactacaggtagacaatatgatttcatttcccttattgtctccagcgttccctttttctatctgataaatttcactatctgccggcacctgttcacaaactgtaatctgatatttcagagtccttccacgcgacaagtaaacctccatatccatgtgttcctaaaaaaatcaatgtcctgataatttttcagtacacgaaacatacttccatctttcatattacgtccataaattatattcttacgatccgagcaatcccgttcgttccggtaatctaaaaactacatctttccctctcactactggatatttcagcaccccagggatcctaagcaatactacgatgtccggattgatcgcctgcaaagccgcaaaatccactgttacagttgtttgtatgtagattttatatcttctggctcttttgcattcttttttttacctacgaatctccaaccaaaaaggcagcagcatatcaaaactaatatactgccgcccacacgttcctatttacttaaatctcagtaatcctataactttacatttatatgctgtttcaaatgaacacatctttttgcaacgtctgcactatttttcaaacacacgtctctttttattactcaataaactttatactcttggtgtcactttcatttcattcgtattttcttttggccacacaatttcttgttcctttggaagaaactgcttcattatcttttctattttagactcttctacataaaaacaaatagttttattcttttcagcagaaacttccttcaattccggaaaaatcttaaaaatttctgcatcagaagaaatatccgccacgtgtatttgcattgcgtaaatattaaaatcctgataatatagaacctccatggaagggagattatttactatcagaaattcttctgtaatggattctgtttcttcatttttaccgtacaaatgatacttttcaaaatccatttctgaaacttcacctataatttttttagtatccacatcaatcataattccgattttgggcaaaggctctccagaacttttccgataccctattttttctaaaataacgcagacacagtttttttgctgatataaacatggtactagctgttcttctgcaatctgataatcctgaagatactctttcaaaattcttttacagtccattttcttttgaacagttcccctatatcataaaacataagtttacaggtttctaattctgtatatcgttcaatgtaggttttgaattcattttgagtctcgatttcaatatctacaacatactttcctggaaatataaagggaaccatatctctatctacatccttaggcataaaataggaccattcgctattttcattgtaactattccattcttgtccagtcttctttgtagagcaactcgacagcagaaaagcaaacacaagagtcaatgctgtaaattttattctattttttaacattttttcttatcttttctctgcaactcaatctgatgtttcatcagttctaaagtctgttccactaatttttcagaaggtttattcttatccattctttctttatatttttctacccagttctctgtattctccatcactatcaccttcccatctaattaacatcatagtacacatatccgttttcatcttttgcatttttcaaaactcttgccatttcaaataaaagtccaaacgtatatgtgaatgattctgaattattttttaaatttttaatatttacttttttatttgtttctatgttcacatatttttttccatcaaatctatatttttcaagaacttctgaaatatcaataactgtatttacaattatttctccttcgttatagacaatggccgcattcacagaatgatttccattatcaacgactaccagccctaatggttctattaagaatgcatgaatattatatgcaaatgatatcccattaaaaggattcttatttatctctcccaatcccatcaatccatcaatcatacgagaatggttccaaacacatgatataatgggagtattttgaacctttaaatgtatgttacatttttgccaaaaatcaaacgacaagtctagtaaaaaactattcaaaatagcccgcatatagcctattccctggtaattccgatcattatacatacatttcgtaaacaattcactctgtatagaatttgccataaatttaattactgaacgcacagattcctttttgccttcatctaccaattttttaaaatcttcgatgaatatctgtgtattctcctcaattgtaaccccttgttgttttttcttctgttttttaaaaagcatattatctcctgtgacattgttcattacttttttaatattatatcggaaaattttactgtttacacatatcatttataagttgtattttttcggtaggaatattgtatatcctagaaaattcattaatggtccaattattatagactagaaaacttctagttacatatacatctgaatttgattccttaattaagtgataaatactcaatttatcatgacaattaaaactataagaaggcgtgttcttcaaatttccatttattattttcgtatcatattgttcttttatattcttcatttcgttcgtataaactgttatattgcttatatattcttttcttccttttttctttgtacaaaaatatggttcagttaaaccaatatcataaatccctcttggtgttgtagaaagtgtaaaaatcagcgtattaatatctttatatagtatggttttttttctaataccataaatcaacttttgttctaatagtctatatctccgctgactaagaaagaaataaaaaacaacaagacatataattagagtacctataaaaaatattattttttttggatatattttaaaatcaaatgaaaaaataagttcacttaaacaaaaagaaaataatgtacatataattattcctgatataaaatcaaacaaattgaaaaatttgctacctcccatgatataatcataacttttattcattatagcatcctcccatcgttatatctaaaaggaaattgtctactattccaaaaaaattatttaactgattgccaaaacttttcgtatagtttaccattaactcttcaagaatattttcatttaatgtgccagcttgtatcaaccctccaggaaggctacacaacattcctagtaatgctgattttatactatcttctccaatctggcccaaatttttatgattatatccatctatcctatctaaaccctctgtaacaaaagtacccaatccattagctataccaccaacaatagttccaacaggcctaatacccaagccaccctgaatgccaccacttatagcccctcctataaatccatttgcaaaatttccaccatttttaatattaataaagccatttactgttcctcctattgctgctccagaagcaactcccattaaaactgttccggccacaccagctgtgtaaattgatgctactgcaattccagcaattactaaacttgttccaacgaccttagcaatatcctctttgtgatctactatccattgtccagctttctttccaaatttttttacattattgagactcttagtaataccctttccgatatcacttaaactaggccattcaccatctaaatctaccaagaccatcggtgaattaaagcagtaactataacggttcatactgaacggcagattcataaaaccagcaatcacatcctgccctgcaaacctgccgttctctgccagatattccctttcctgggcataatacgttcccgctgtctcatctctttgatagcccgtatatccaaacggctgtatcttcccctggttctgatataaatcttccccaaagactccatatccatagctttccctgaggtttctggcactgtcctcaatccgaagcgggcttcccagttcgtcctgaaggtaatagttcctttccccattctcttcatacgctgccacattcccgtcccagaagtatctctggctccggttttcctctgtccgctccagaaggttataatactgcctggtcaggtccagggtataggtgatctgccggctgtttccgatttccatgccgatcctgctttgtgggtccaatttctccagcttctcttttggaaggacaccttcctgctttcctatccggtgtcccagtccgttgtactggtatcttgcctgttttcctgccgcatccactgcttcttccagacggttgatggcaccatagacatactgttttttccatgccccattttcttggatgccggttaggtttcctctcttatcgtagccgtactctttccagacttctctatgcttttcgctcaccatctggttgaggatattgtactggtacgaagtcctttcgccattttcttctttccatgtacggtttccaaaggcatcatatccatacgctgtctgtatctgtccgtccttttggatttctgacagtctgcccaatgcatcatacccatagctgatgatccggcctccctcttttagttcgaaaagtcgtatctgctcatcatagccatagtgcacggtttttccatctgtatacaattacattccttcaggatatatgatatttttcccttctttttccattcgtttcataaagttagaaaaatgctcacacattccatctacaaaaaaggcttttttctttcccccttccacatatattttcattcctcctctagtcactttcccataactaatatcagaaaatttccaatgacgtttaaaaataaatgctttcaccacagtaatatcatcaccatctacaatgatatcccataccccttttataggagctaccatgagtaaaaaacccggaattattacaactaatataaaaatcaccataattggtaatgggatgtcctgattttctacttgagcaaaaaccaaggcaccaatgactattatcattactatagttcccaatcctgcaaaatctagtggagctcgtacgacaaattttttcaatgctcctgtttttttcctacttttttttgctaataagtccattattcccgttacaataaatgctacaataagaattcttaaaaaaagcatactctttcctcctactattctaggcataatacagcttctagttcctcgtttgtaatagtttttagcattttatctaaaatttggttggtataattttttatttcatttgtttccgttacccattcctccccttgattataaatatcatttaatatacgtttaagttcctcttttatatttattcctggcatataacttgattgtaaatctgtaactttatcaattacttccattccagatactcctataaatccattcatatatgtactaaatcttggtttaacaatcttgttatttttccaagcatttctagcacgtgtaatttgacttctatagtacctatcagatttaaaaattttatttccccacttagtaccttttattttcccaaaatttccctctatttctttgataccgtctgtcgttttttcatttaaccatttttttgccaattgacgctgtaataagtacctgacacctcatctctttggtagcccgtataaccaaacggctgtatcttcccctggttctggtacaaaaatggtattattttctattcttttttaattgattgacataatatgattttactggtatttttcgcctttctatatcatccataaattcgcttttatcaacgcctccatcaatagtaaataacttttctccatttacataaacccgaatagaacttttctttctctcacaatatgtaatatctccaaactgaaaatttttcttatttccaaaagttgaacgccatataatttcatctccattgacttctaatttccataccatcatatttactgtaccaactatgccaactaaaaaaaagaagccaaatacacatacaacaaatgtatcttcttgttgtgctattcccatagccatacaacaagcaaagaatattgtacctacaacaaacattattgcgagtattttttcggtctttacaacataatgtgtttttataatcccttttttttgttcttcttctcgttctttcgccttcttttcttgaagttttatgatatatcccaatacaacaaaaacaacaagatatggacctacttgtataaacattctcaaaaacatgcgtataaattcattcatctccattatacctcctacgcttcacatcgttcaacattatttattccttgtatagttcccaattctaacatcaatacttttcccatcattttctttccaaaactttcatttatgtctttggcagactccaccaatttttgctttaaccatttttttcctagttcatcttgtaatatctcaagttcctttacttttcttgttgcacgttgataactttggcctttcattcgcttctttccatatcctgccaaatgtaattttgccttatgcacatcatcattagtttttctcaattgttcttggacagtaggtcctttccctttaattttatattttccagcaccataagttaaagcatcaatacctccatctattaccactgatccccaattaacctcactcaattttttatcgtctgcataaatttgagttgcaacacttgtcgccgctcctgtagctcctgtggcaagtacaccaccaactattcctattccacttcctgcaatcccaccttttatagccccacctatggcatttacagcaacctcttttagatttaactttctatccaaaattatttgtgttgcaagtgaaaatattcctgctgtagcagctccaataaaagctcctgcaataattgttggaaattccccattgtaatctgcatatattaaagaattattccaacaataactatatctattaagtgtttctggatactcaacaaaaccaacaatcaaatcctgctctgcaaaccttccgttctctgcgagatattctctcgcctgggcatagtaggttcctgctatctcatctctttggtatcccgtatagccaaacggctgcatctccccctggttctggtacaggtcttccccaaaggctccatatccatagctctctttgattgttccggcactgtcctcaatccgaagcggacttcccagctcatcctgaaggtaatagttcctttccccattctcctcatacgctgccacgttcccatcccaaaagtatctctggctttggctttcttctgtccgctccagaaggttatagtactgtctggtcagatccagggtataagtaatctgacggctgtttccaatctccatgccgactcttctctgcgggtccagcttctccagtttttcttttggaaggacaccctcctgctttcctacccggtgtcccagcccgttatactggtatcttgcctgtttgcctgccgcatccaccgcttcttccagacggttcattgctccatagacataccgcttcttccatgccccattttcaagaatggcggttaagtttcctctcttatcataaccgtactctttgcggatttccccctgtctttcgcttaccatctggttcaaggcattatactgataagaggtttgttccccgctttcttctttccatgtacggtttccaaaggcatcataaccataacggtactgtatctctccgtccttttggatctctgacagcctgcccagtgcatcatacccataacggtagtgtccgctctcacgctccagccctcttctttccttggtgattccggtcttatttcccaaaagatcatacagataggtgtagcggtcaagaataccctcctggtcttgatgcaacagttctgtcagctggtcttttctgtcataatggtaggtcgtcctcattccattcgggaagttcttttcctttaatcttccaaatgaatcatatccataggtgatgatgctgtctccctctttcagttctgagagtctgacctgttcatcataaccgtaatagaccgtcctaccatccgggtatgtcatgcttcgtctctctcttgcagttgaaactgtttgtaatttaggaaatatatccatcaggcattgatagatttccggagcttttatgttttctctaatatctaattttcaactgatctattatctgttgataggtaaaatcactccaatttatcttttttactttatccttccattcagcttctaaataaaaccaaaaataatatgttttattttctaatttaacaggaactacttcaggtcttattccatcaattgttaaaccttctacttcttgtccagcccatgttccaaaatatatcgggaatccatctttctcatcttccaatatatcaactactgtttccttaataatgaaagcaacaactgaatcatcaaaatcatatgtatagtggctattttcaaatccaacttctaaattatagctttcaatccaatatggttgtgatatttgattatctttgattttaaaaatcatgtaggcaaatgcatctgcttttacagatgaatcatccaaaccttcctcagttaacaaataaaaatatatcaaccgatcttcatattttttttgtataatttccgttgtctgggatcgatatgccacataattttcatttttttaataatactaacatcctgcttagcctcgtctaaagtatcgtaccattctaaatcttcttccatatttattgtagaagagatttgatttcctgatgaaacacttatttgatttggcacatcactgatgtcagatttctgatgaaacagccatatgataatgcagatagttaacacaattattaaaacagataatcctataaatactatttttactatttttttcattttcaaattttatcctccacaagtcgtcatctgaggtatactattaataatccattgataaagggacggagctaccgttgcaatatatgcggctaacggtgccagtataaaatcatctaatacaccaataattgttccatcatccaaaattaaaattaccattcctgttacagcagcagcaaccaacgctacttctccaattttattccatttcatgaaattcttttcatttgccaacgaccatgatatcttacttttagaatcaaaaaccttactatttggtagaggaattggtaaattacctgtatctccacctgcagcaactaaaatattcattccatttttatcgaatccatatccatattcactatatagattactttttttgtctttaattattatggattctttatatttccatgatgaaatattccatgattctcccgatatactttgattaaacaaatagcctgttcccggaatctctactctcgcatttatagaccatcctgcaaaatttctgatttcttttccatttgtattattaacaacatatttattaacccaaatatttcctcctgtatgttctttaacttcatatgtatttccatataaatcctgcttatacaatatcgtcgtttctccataaatattagaattccaaaacttttttatagcattagctgttttttctatccacttcggccatgccccgttcagatccaccagcaccatcggcatattaaagcaataggtatatcggttcatgctaaacggtttctctatgactccggcaattacatcctgccctacaaatctgcctgctcttgcattgtattcccttgcctgcgcatagtaagttccggcaacactgtctctttggtatcccgtatacccaaatggctggattcctccctgtatgtcataaagctcttctccaaatgcaccatagccataagtctcctgcaggattccatcttctccttctatccggattgggcttccaaggtcatcctgaaggtaatagttcctcctgccattctcttcgtacagtgccacgttcccatcccagaagtaagtctggacattggtatcctctgtcttttccagcaggttatggtattccttcgtcaggtcgatcagatagctgattcgtttcattggttcttgattttcagcttcctgctttcctacccggtgtcccagcccgttatagagatagttggcttttgctccacttccattcacagcctgttccagacggttgatggctccatagacatactggttctttacctgtccatcttttaagatctggcttaagtttccacgtctgtcataacggtagatttctctgctgacgcttccacctgcattctggtctgtcagacttaccagctggttcaggctgttataacggtatcttatctgtgttccctgttcctcttttccggtacggtttccaaaggcatcgtaggtgtaacgggtctgccggataccgtctttgtggatactggacagacgctctagcgcatcgtaaccataggtgtaagctccgctttcttcttccagattccgtctttcttttgtgataccagttttatttccaagcaggtcatactcataggtataacgatccagtataccttccttgtcagtatgcaacagttctcttaactggctcttttcatcatacgcataggtcgtcctcgttccattcgggaagttcttttcctttaatcttccaaatgaatcatatccataggtgatgatgcgctctccctctttcagttctgagagtctgacctgttcatcataaccgtaatagaccgtcctaccatccgggtatgtcatgcttcgtctctctcctgcttttccgtaggtgtaagcgacttcttttttgtccggataggtgacctttactgcccttcccagtgcatcattctgaatctttgtaagtccaatccagtcctgtacttccatcagctgtctgagcgggttataggacatcttgacttctcttccatctgcatactggatcccggagacatccccctgctttgtatatacatactttgtcagatatccttccttatccagcttgcttaataactgtccttttggatcgtaagtataggcttccttctgtcccagagcatcggtaatacctgtcactcttccccttaaatctctggtataccgggtcacctgacagagccggtttctgccattttgtttttcagcttctaaaagttctggatccaaacaccatgttgagaggttttcctgtcctgtttcttcctgctgtgttaacaggcttccgtctgcaccatactggcggatctcgatcagcctgtcgcagaggtcatagctgtattcggtttcatttccgaatgcatctgtgactttctttaactgtccgctataagtgtattcgtacttcgtcacgtttccttttccatctgtcatggacgtgacattgccaagggcatcataggtatagttcttcttttccccattgtttccctgtatctccgtaattctgcccatgcagtcatagaaatagcttataacaaatcccgttgcataagtatgtgtcctgacattccctgcagcatcgtaggaataggattcctctgtcccgtccgggttctggatcttctcaagcagtcctcccagataatacctgtatctggtggttcttcctgcttcatctgtcacgctctccagatctccaagagcggtataggtataacttctgctctctcctaacggattcgtctctttcaggagattccccgctgagtcgtattccatctgcaccacatttccaagggcatcttcggcactgatcaggtttccttccccgtcatacgcataccggtaatgcagtccctcttctcctttgacctctgtcacccttccaagagcgtcatatccgaagcttgtctgccctccgttttcatcttcttccgatatccggtttccattggcatcgtaggtatagcgtaccacagcgccgtctgcatatttgattcttccaagcaggttctcctgattatagatataagtcgtctttgctccattcggttccgtgatccgtgccaggttccacatgctgtcataggtcaggagggtttcccttccctctttatcaataaccttgcttgggcggtttaagacattatattcccttcggatgctttccccgtcaaagtccgttacctttgttacttttccgcttttttatccgaataagtactgcttcttctttatcctaatcttccacattatttatcaatcacattacagatattttttcatcctttaatctcattagcaaaacttctacattttcattatatctgtctatttttattggtttttctccttttacataaataattatgtactccttttctattatacttttgtgttgctcaacctttgtaatctctttaaattcaactgtccgcattttctttagaaaatctttcttataaagtttgtcttgtacttccagttgatcataccaatagacaccgctgtaataaagcaacagtaaatctatcactcccagcaacagatacatccaaattttcccatctcgagtcaaaaataatacagttgtaaaaaaagtataaatgcagaaacctatgataggcaatattttccggataatcattggctctacgatgcagtgctctttcgtagatggaatcaattcttcttcatctatccccctttttttcaaaataattagtaaatcataaacatctccttctgcatccatttcatactggaatatctttttctccccctgataaaagcgatattgatttcttctctttcctacgcatcttgtaatatcttcaattctatatttccttgtaattcctaatgcagaacggtagataatctcttgtgtgtcatattctatcttccatatgtatccatataatgtcagaacaattcctaatactgtaaatcctatagataccaacaaacaaatcaacataaaataacaattttctatctgttgaacaaattcccatttgaagatctgacttaaaataaaagcaatagttgtacaaccaaaaaatattccgcatggtaatcctactttcaagatgctgggtgctgtaattatatatttttttgtctgctttctggatttctgcttttttgttacctcaacgtctttctgttccttatattttttcatagcgtattcagctattcttatggataaaagaatgctgattactggtacaagttctttaatattcatagctgatctcctatcccattactccacaaatttctaacgtttcttcaccatctttatcgaccttaatattgttgcttaatatcgacattatccaatcatcactgttttctattggcaaaaaatcttttaacatatctttaatatagtctttcgtatggtgtcttctcaatattttcacactaattaatttagggtatagatgaatcttgaaaaaaactatatgctaactctatttttgaatttcaatagttaatgagttaccggctttgtcactttgaaaattttcataataccaaaagtaaaatggcttatcacaaatttcaaaatatatgatttcgtctggttctttcccttctacctttgtattataaatatcttttttatgtacatttccatatataaaacgtttgttttctgatccaatatttaagtcttgtaaagcatcactcaatgccaattgggatttcattagactcattgtatctttgtcatatggtcgccccttttttattacttcataagtactcgtcacatatgcatacttctttttttgatttatttctttaattttaaattttgcaaatgtcaaacttgcctctgtatcatctttttcagaaataaaaaacacactcgtataatgttcattttcaaactgttttataattttatcaatatgccccctgtattcttctcccttttcgtaattattcgaagatctcactaaggcctcttctattgaatcagcataattatcatctaaaagttttgtttcatctgcattataattttttattggcttatattttcttattttttgaggaatatatcgctccgtttctttattacttttaactaaacttcccccatttgttgtctgccctaaataaccaagccccacaatacagccgaaaattatcacaatcacagccgaaaatattactataatttttttttcatataatcctcctgtttattgcaactatacataaataatgtttgcacctttctatattatcgcaaaactattaaattaattcttttttcaattcgtacaagtagctggtattaaaattctaaaacctttcattaacccttctgccaaagcaggtaaatggctacttagataagtaagtattcctggaataaatgtattatctaatgctccaataccggttccatcatctaccactaacaccaccaaagctactattgcagctaaagaaattaccccttctcctacttgtttccagtctgcaaattctccctcatatactagactccaattaatactaccaaaatcctctatcaccgtattatctggtaatttaaatggcattgttcctgatgttcccccaactccgccgctatatcctaaaccatttttatctactatcaaacttcccgttgcacttaatcctgtataattgctctttagtttaacgttagattttatctttcaattcgaaggattcaatccttctcctgaaagaactaatttagaagataaatttttcttagaatttcctatgttaatattaagagaccatcctaaaaactctccagacatattttttttaagcacaaataaatctgcaccttcatgctctgtcacttcataagttgcaccacctaaattttctttatagattactttatcaataccgataatatattttttaattacattttcatttaaagaatgtgctacatctgaaaccacatccttaattgtattctcaacactctccaaaccatttattatatcactccaacttggaaatgcaccatccaaatctactagtatcattggtgcattaaaacaataactataatggttcatactaaatggcatatccagaaaacctgcaatcaaatcccgccccgcaaacctgccactctctgccagatattccctcgcctgggcataatacgtccctgctatctcatctctttggtatcccgtatagccaaacggctgcatctccccctggttttggtacaggtcttccccaaaggctccatatccatagctctctttgattgttccggcactgtcctcaatccgaagcggacttcccagctcatcctgaaggtaatagttcctttccccattctcctcatacgctgccacgttcccatcccaaaagtatctctggctttggctttcttctgtccgctccagaaggttatagtactgtctggtcagatccagggtataagtaatctgacggctgtttccaatctccatgccgactcttctctgcgggtccagcttctccagtttttcttttggaaggacaccctcctgctttcctacccggtgtcccagcccgttatactggtatcttgcctgtttgcctgccgcatccaccgcttcttccagacggttcattgctccatagacataccgcttcttccatgccccattttcaagaatagcggttaagtttcctctcttatcataaccgtactctttgcggatttccccctgtctttcgcttaccagctggttcagggcattatactgataagaggtttgttccccgcgttcttctttccatgtacggtttccaaaggcatcataaccatactgtgtctggatttctccgtccttttggatttgtcccaaaccagatctgcggttctcttttgtatgttttgatggatatattctttctttccatgtatttctttctcctcgtatggtttcttccaattaacctaagcatcccaatttttctcttgaaatgaacctccccatatttagtataaaatgggaatttagtttttgaaatgcgatagttcaatctactatacctaacaatttctttgctagataattatttatttttttcttttttgatttgcccaataagattttactggtattcttctcctttttatgtcttccataaattctgttttgtctatattactatcaatcgtaaataacttttctccatttacatacactcgaatagaacctttttttctttcacaatatgtaatgtcctcaaaatgaaatgtcctctttttaccaaatgtggaacgccatgtaatttcatctccattcacttcaagtttccacattatcatatttactgttcctattaaagcaataataaaaaaaatactaaatactattggtggaaatatatcttcttgttgaagagcacttaatacagttgctccaccaaaaagaactactgccatgataaaaaatatggtaagtattttttctgttttaactatataactagttcttataataccctttttttcttcttctctttcttttgctcttttttgttgagttcgtccaatatatcccaaaacagcgaacacagccaaatacggcagcatttgtataaatatttcaaaaaacatatatattcctccatctgcatgttacttcctatgcttcacattgttcaacattatttattcctggtgcgatttcgagttgtaatatcattactttttcctgcaattttttcccaaaattttcccctatttctttgataccgtctgtctttttttcctttaaccatttttctgctaatgaatcctgtagttcttcaagttcagataccttttttattgcacgttgataactttttccatgttgccgttttttgtcatatcccgccttatgtaatctcgccttatatacatcatcatttgtttttctcaattgttcttgaacagtaggtcctttccctttaattttatattttccaacaccataagttacggcatcaatacctccagctattaccactgagttccaatcaacctcattcaattttttatcgtctgcataaatttgagatgcaacactagtagctgctcctgtagcacccgtagcaagtatgccaccaactattccaattccacttcctgcaattccaccttttacagcaccacttactgcatctaccgccacttctttcaagtttacctttctatccaaaaccacttgtgttactattgatgaaattccagatactaaaaaaccaatccctgctcctgcaattattgttggaaattccccatcataatccacatatttaaaaggattatcccaacaatatccatatctattaagtgtttctggatactcaataaagccgacaatcaaatcctgccctgcaaacctgccactctctgccagatattctctcgcctgagcatagtaggttcctgctatctcatctctttggtatcccgtataaccaaacggctgcatcttcccctggttctgatacaggtcttccccaaaggctccgtatccatagctctctttgattgttccggcactgtcctcaagcctcagcgggcttcccaattcgtcctgaaggtaatagttcctttccccattctcttcatatgctgccacgttcccatcccagaagtatctctggctttggctttcttctgtccgctccagaaggttatggtactgtctggttaaatccagggtataagtaatctgacggctgttcccgatctccatgccgactcttctctgcgggtccagcttctccagtttttcttttggaaggacaccctcctgctttcctacccggtgtcccagtccgttatactggtatcttgcctgtttgcctgccgcatccaccgcttcttccagacggttcattgctccatagacatactgcttcttccatgccccgttttcaagaatagcggttaagtttcctctcttatcataaccgtactctttgcggatttccccctgtctttcgcttaccatctggttcaaggcattatactgataagaggtttgttccccgctttcttctttccatgtccggtttccaaaggcatcatacccataccgggtctgtatctctccgtccttttggatttctgacagcctgcccagggcatcatacccatagcggtactgtcctctctcatgctccagccctcttctttccttggtgattccggtcttatttcccaaaaggtcatacagataggtgtagcggtcaagaataccctcctggtcttgatgcaccagttctgtcagctggtcctttctgtcataacggtaggtagtctttgttccattcgggaactgcttttcacacagtcttcccaccggatcatatccataagtgatgatgctgtccccttccttcagttccgaaagacggagctgctcatcatagccatagaatactgtctttccatccggataggtaatgcttcttctctcccctgcttttccataggtataggatacttcccttccgtccggatactgcaccttttctgccctgcccagtgcatctatcgtttctgtgacctgtccctgctggtctctggtataacgggtgatctggagctttcggtttcttccattctgtctctccgcttccaaaagctctgcatactataacaactcccacaataatttttacaataaagtttttattaaaatatatattccacttattcctataatgcaagttataataaaattaaaactcatacatatttttttttgtcgtcttgaaaatttatgaaatttatcagaatcataatctctaataaatttttttgttttcattgcataaactgtatatccaattgctataatagatgaaataatggttatcccatcaaaaatcattttatcactaatattcattattcttcacacctctgactaattccttctgaaaatatattggtcgcaacaccacctaaatactctaagttatctataatgacatctaaaattttatcttttatattatagtactctgttattgctcgatattttccagctattaaaaaaccacctgcagattgtattaatccctcttttagcatttcatctaaactaatagacggtatatcattttcaaatatttttgcattaacatttccaatcattccacccaaaaaatttccaatatacatattagtaactccgctaataccagcagaaatactaccattaatggcacctaagcagataccatccaaaacatccccacccattaaatatgaagatgtaccacctgcaattgcgcctatagcagaaggtaccaaaactgttgctgctgcgccaccagttgcaactatacaggaagtagttatcgcaactattcccaccgtcgttattatttttcctatatctgactgcacaaatttttctgttacgtctactaatttattgattcccttattgataccttttctaatgtcgttccaactcggccatgcaccacccaaatccaccagtagcatcggtgtattaaagcaataactgtaacggttcatactaaatggcatatccagaaaacccgcaatcaaatcctgtcctgcaaacctgccactctctgccagatattctctcgcctgggcataatacgtccctgctatctcatctctttggtatcccgtataaccaaacggctgcatctccccctggttctggtacaggtcttccccaaaggctccatatccatagctctctttgattgttccggcactgtcctcaatccgaagcggacttcccagctcatcctgaaggtaatagttcctttccccattctcctcatacgctgccacgtttccatcccaaaagtatctctggctttggctttcttctgtccgctccagaaggttatagtactgtctggtcagatccagggtataagtaatctgacggctgtttccaatctccatgccgactcttctctgcgggtccagcttctccagtttttcttttggaaggacaccctcctgctttcctacccggtgtcccagcccgttatactggtatcttgcctgtttgcctgccgcatccaccgcttcttccagacggttcattgctccatagacataccgcttcttccatgccccattttcaagaatagcggttaagtttcctctcttatcataaccgtactctttgcggatttccccctgtctttcgcttaccatctggttcaaggcattatactgataggaggtttgttccccgctttcttctttccatgtacggtttccaaaggcatcataaccataccgtgtctggatctctccgtccttttggatttctgacagcctgcccagggcatcatacccataacggtactgtccgctctcacgctccagccctcttctttccttggtgattccggtcttatttcccaaaaggtcatacagataggtgtagcggtcaagaataccctctttgtcttgatgcaccagttctgtcagctggtcctttctgtcataacggtaggtagtctttgttccattcgggaactgcttttcacacagtcttcccaccggatcatatccataggtgatgacgctgtccccttcctttaattctgaaagacggagctgctcatcatagccatagaatactgtctttccatccggataggtaatgcttcttctctctcctgcttttccataggtataggatacttcccttccgtccgggtactgcaccttttctgccctgcccagtgcatccggggtgatccttgtgtttcccagccagtcctgtatctcaatcagctgccggagcggattataggacagcttcacttcctttccatctgcatactggataccggataagtctccctgttttgtataggcatacttggtcagatacccttccttatccagttttccaagaagctgcccctttttatcataggtataggtttccttctgtcccagtgcatccatcgtttctgtgacctgtccccgcaggtctctggtataacgggtgatctggcacaaccgtttccttccattctgtttctctgcttccagaaggtctgcatccataccggatccttctgtatcttccttcaggctttcctttgcaccatactggcggatctcgatgagccggtcacagacatcgtattgatattccgtttcatttccaagggcatccgtcaccttcgcaagctgcccgcttaaggtataggcataccaggtcgtgttcccttccccgtctgtcatggaagtcacgtttccaagggcatcgtaggtataggatttcctctccccttcacttcccataatctctacgatacggtccatgctgtcatatccataagtcagcacaaacccggtggcaagggtatgggtttccaggtttccgttggcatcataggtaaaggcttcctctgtcccatctgcgtatcggattttttccaataatccgcctttttgatatcggtaacaggtaatccgccctgcctcatcggtaatgctttccacatctcccagtggcgtatacgcatagctgcggctttcccccagctgattggtttcctttatcagatttccgtttccatcgtattccatggataccctatttccaagggcatcctccgcctcgatgagatttcgcttccccgtcataccgataggcatagtggagtcgcttcttccccgttgacttccaccactcttccaagggcatcataaacaaacgtggtctttgccccgttttcatcttcctccccaatccggtttccattggcatcgtaggtatagcgtaccacggcgccgtctgcatacttgatccgggatagcaggttctcttcgttataaagataggtcgtccttgcaccgtccggtgctgtcactctggcaaggttccacatgctgtcataggtcaggagggtttccgcttccctctttatcaatgaccttgcttggacggtttaagacattatattcccttcggatgctttccccgtcaaagtccgttacctttgttacttttccgctggcattgtattcatagctctggcagtttccttctgcattttccacacaggtcacatttcccatgatgtcataggtgtaacgggtaacattcccttttccgtctatgctttctgtcatccggttcagggcatcatacccataccgggtgacatttccctgtgcatcttccatcgctgtgatgtttccccttgcatcataggaaagcatgatcctgcttttgtctgcctgccggatggtctgcggccacccggacgctgtataggcaatctccatttcattcccaagggcatctttggtttttacaagtcgtccctgtgcatcgtattccccgcacagtttttcctttccgtttatcttgatcccggttggctggttcttttctccataccggatttccgtcttatttccaagggcatcgatcacgcgcaccagatttcctgccggatcataggcatactgggttttattccccaggcggtccacatataaggtcttctgattgttctggttataggcaaagcgttcctccccattgctgtggatatgcttgatatcccgatacttatcatcatggacataaaccacacggcttccgttccgctcggtaagctccaccgttttcttttcctcgtcatatgtataagacatctgtgtcccgtccgggaacttctgcaacgtagtgcggttctcctcatcaaagaagttttctaccgtcacaatctcccttgggttctccacctgctccagtttcccctgcggggtataaccgtaacgaaaagcattcccgtccggaagtgtggcttccttcaaaagttctccctgataccggtatgccacgcatcttcccgtatggtcttctacacgctccagcatgccctctgtgtcatagaaaaagacaaagaattcccctgtctcctttttgacctttaccagacgaaacggtgcttcctcttcataagcaaacgtgatacggctacccgtaagagactcggtttccaggcatttcccttctttgttaaagcggtatgttttctgagctcttgtacgataagtatatccgtttttctctttttccaaagcaccttcgctgacaaacagggaaaggtaacggtctttttcccagaagaaccgctcctcttttccatcctcccgaagaagcactgcctccccgtctgaaaactccagatgcacctcataattatggttccagtcttttccaagcacgcccctgtgtgcattgatggcattataaaaacggcggaaagcaaaagactcccttccgccgacttccagatctgtccggtcatagataaagtttcccgtgcttaaatttaccgggtccttggaaaaggcatggcagatggcttccgctcccttgatgtttgccatcagcttttccactgccttttccccattttccgttaccttgttccaccttgcctgcacctcttcaaaggcttttttgaatgctgagtagtccgtagtaagcggcgtatctattaaaaactgctccatttcctccaaaagtgtctggaggcttttcgttacccctgcaagttctcttgtctgggaggcatagtccgtatcggctgccgggatcaagtcgcaggctctttggcggcatttctccaattttgtcaatgcggtctccatctgttccgtctttaaggcactgcgtaactgagaaacgtcatggacggctatcccataacgggcttcagaaggcactgcgtccagtgcttcccctgcctggtctgcataagtcctcatagcagacacatgctccttgcactgttctaagatgcttttgatatccttacacagctgtgtgatctcgcttacctggaatactctcttcatctatcttccacctttcttttataaccgatgacagacgactcttctctgctgatattttctgtcccatctcgtcaaaaatcattcgtttcgcactcataaaatcacgtttcttttttcacaattttttctttattttacatgatttcgccctgtttttcaatcttttcatgtgcttttttgtgcattctaccatatcctcttctaacttttttatataaatagaaaagggatattacagcgtcttatccgtctataatatccctgttctctcttatttcatttccctgtgaaaaatcaattttaccttacgattcacacctgcattgtggtaataaccaaattccacttttcgattttcttcccgaactccggtgtaactgaacaatagctgatctttgatgtttccaagaattaaaacttcccggcttgccaaaagcatttcgataaatttactccgtgtcatcttcttcactttaaattctgaagtgactaatacataaataccgtatcggactgcttcttccaaaatatcgatcctgctgttatcttcttctacattctcatacagttcctgaagcatatctaccatcacatagattggtggaagtgttttcacaaatgtttccatgcttaaggaaacatcatccagttttgcttcttcatattcttcttttcttgcaaaaacctcttccttgatctgatttaaggatgcagcaacagcactcttatctcctgcataaaccacattttcttttgactggtaagcggcaagtgcatgactcttattgtcaaatacatacactttttcatctgacagcagggtaagcatatttttaatcacatttgtctttcctgtctttgcatttccaagaataaatgccggagcctgttccattgaaagatagtaaacctgtaatgtatcggtatccaatccaatcggcactttgcagattgtcttttcatatcccggataggaaggaagcattggcatggtaagttcttccggcataaccgggatttcttttgctttttcttccgaagatttctgacttatttcaaaaataagttcctttagattttgattatattctttctccgtttcaaaaggaaccggagtatacagctgcatcacatggatactgtctgtttttaccaaagcccttcctttatgctcttccggcaacttatatggacttcttcccacaaaggaagaaagttcactttcatcaaaattaaaaccgccgattcttactttgaaattgtttctggctgcacttctcattgctccgtctctcgatgtactaactgccaggtaaatgccaagtcctgcaccatctcttgacaccttctgtataaagttttctacactttcgcccaattcctttatgacttcatactgatcaatcacaattacaatggcttttaatggctctggctgtgtttcattatatacagaaaaattctgtaccatggcacgtgccagttttttctttctctctttgatttcttccagaattaatttctggaattttcctattttttcttcatgatcgatgttcatgtaatctgccacatgaggaagctgctttaatgggatcattccgctgtttcccaaatccaaaagatagaaattcagatttttcacagcatttttggcagacaaccctaaaataatctgtgtaagcagcatggtttttccatatccgctggaagacagatacaagaaatgtccattcttttcaaagtctaggatatattctgtctgagcctgttcctccggaatatccatcataccaatccctaatttcaaatcaaccttttggaaatttacactgtcttgaatgtccaacacataaggagactgtatctgaaatgccagagatggaagccatgtctttttcactttcacgcagtgttcttcttcataaaccttctgaagatgttctaccaccacgtctaactggcttttctttaactgcttgctttcctttgttccactaaaatccttatttaacgcttctccttgtccaagtgcattcaacagatagactctgtcatcttcctctttttgttcttcttttgtaccataggctgcaccactccatgcagactggaacaattcataaatttcattatttccaacctgtaaatatccacgtcctgcctgtgtgatgtttgctgcatctgccgtatggagcatttctttactatccgctgcattttgtacttttaaacataaacggaatgttgagttactccaaatctggtcatccactactcctgatggtttctgtgttgccagaatcaaatgcaccccaagacttcgtccaatacgggaagtagagtctaattctgccataaattccggctgttctttcttcaactccgcaaattcatcactgatgataaacagatgcggaagcggttcttctgccttccccatacggaataatttctgataatcattaatatgatttaccccatactccgcaaaaatacgctgtctgcgtgccagttcactcttaatagatgccattgcccgcatactctctgctttgtctaagtttgtaatcgttcccaaaagatgcggaagatctgcaaacaagtttgccattcccccacctttataatcaatcaaaagaaagccaacttcatggggatggaaattcacggcaagagacaaaatatacgtctgaatggtttctgatttacccgaaccggttgtgcctgccacaagaccatgcggtccgtgtgctttttcatgaaggtttagttctgtaaaatcattttctgcctttgcaccaatcggaacggcaagacttttataagcactatgggactcccatcgtttttccacttccaactgttctgtgttatctactccatacatttcaaaaaaggtcagtttgtctggtacctgcgaagtaatgccctgttcatgtataagtggacttagcgctcttgccattttctctaacggaatcccttccgtatgctgcacttcaaaacgaaggttctttctctctccttcttccaataaaagatgagcctcttctgaattatctaaaatacagattgttctaatattttccggcagattggattgttgatcagtcgtatacatcatactaaagcctaattccatttccctgctttgcaggtattccataatcgcatgatttaaaatcaatttgggttcatcaatgataaataacaaatagggaaggaaaatgtgtgctttcttttcttcttcctgttttagttttctctcttttaaaatctgctggatacttcctaatatctgatctcgaatctgctccgaataaatctccccgatcacattgataaattccaatcgcagatgcggataccagcgcatatattgaaagtcctccgtatatgctccgctatggataaacacaatctgcagttctctgtaactttggaaaaaggttaattgagcaagcagatatttcaactgctcatggatatttctcttgtttcctaccagacctaaatgtgcctttttcagatcaatctctacggggatctgctctactttttgaaattccttcggtatttttttcgcccggtcaatcaattcatcctttgtcatatccagttctttatcttcataagaaacttctatctgggactcaccttttcggtatcctaaatttacttttaaaaagtcatcatctaaaatagaacgttcataaatacggctgctgtattccagtaccatgtcctgcagcataggaagtgttggtgtctgataatcaattgcttcccgttcttctttccttaacttcttgatttcttttcgtttgcgaagaagataatcatcatacatgatttcccgatccttattttcctgcttaatgttccgcttttcgcttacatatctttgaatggaaaagattaaggtaatggcagtcattcctgctgtcatatacatataaggtcctcgtttcataaacacacccatggcaatggtaagtgccatcatgcaaagaggaggaataatcagttgtgccagactacctctggacatttcttttttcctgggaggaactttaatttccactttttcctcttttctctgatatacaactcttggagaacgtttatagaaaggaaagccttcaaaatattcttcttcctggcgttccggaagtaacgttgtttcaaaacattctgtatctgcctgaacttccagtttttctttaaaaaatgtaatcgaaagctcttcaatctgtatttgatcgccatttttaatggaaatcttctcctcattcacaatctgatgattcaaaaaaatcggaatatttccctctcttttgaaactcaagatatctccatccagacacatctgcattggaagatgccatacaaagtcataagaaaacgaatctgcttctgtcccgaaccagatctgcggttttcttttgtatgttttgatggatatattatttctccccatgttttcttttctcctttcttatggtatcttcctagcatttcacatatggtaattttaaatttatgttactctaatgtaaactttaaatttttccctgcaatgttactttctaaattttcataataccaaaaatatcttttcccttgacatgactcatattgaataacctcggtgggttcttgaccttctattttcattttatacacttcttttgatttgcaatccccaaaaacaaatcttgtattttctggattaacattcatattttgagtatagtcactaagagttaattgatcacgtatcaaatttttaatgcttcctactgattttgcatttgatcttatttctgttggtatactagataagaaagcatatttttcagatccattaattaattttttaataaattttgccatcgtaatgcattctgtatcattatctttttttgatttaaaatatatcgttacatatttatcactatcaaatcttttaattaattcttcaatattattttgatactctaaatcgacttctttaggattgtctgcttttatagcttcttccaaagaggaaaaataatgtgagtcttctatttcctcttcattgacataattaccaatatctttaggggtatattctattgatacatcattttcttctatctttaatatatctccatctaccaacattccgattgctattaataatgcaaatactatgcctattactaaaattactatttttattattttttttatacttttcattttttatcctccacaagttgccattttaggtgcactattgataaaccattgataaaaggaaggagctaccgatgcaatgtacgcagctaatggtgccagtgccgcatcatctaatacccccactattgttgcatcatctaatactaccactacgaacaaaattgctgctgtgacaactccaactgtctctaatattagcttccaattagatatttgaaaatcttgagagaaactccatgaaacatctgcatattcgtcaatttttgtactatctggtaattctaatggcaagtttccagatgttccaccatatacatgattataacctattccatttttatccatgtatgtcccacctttataagaaattcccgtatcttgatttgtatactcaattccatgattatatttccatgtttctggattccaatctttgcctgttaatttacttccgacttttaatccatgaggcaaatttatggataaatctaatgtccatcccgtaaagtttcccaaaatatctttttgagcaacaattatactacctcctcgatgactagtaacttcataagagccacctcccgttgtagtctcgtataagactaaatcttctccataaatgtgtttagaccaaatttcctcatatccccacctaatcgcactactaactttattttctacccattgcactccttcatctattgctccaccaatatccgtaatccattttggccatgcaccatctaagtctaccaagaccaccggtgtattaaagcagtaactatatcggttcatactgaatggcagatccataaaaccggcaatcaaatcctgccctgcaaaccttccactctctgccagatattccctcgcctgggcataatacgtccctgctatctcatctctttggtatcccgtatagccaaacggctgcatctccccctggttctggtacaggtcttccccaaaggctccatatccatagctctctttgattgttccggcactgtcctcaatccgaagcggacttcccagctcatcctgaaggtaatagttcctttccccattctcctcatacgctgccacgttcccatcccaaaagtatctctggctttggctttcttctgtccgctccagaaggttatagtactgtctggtcagatccagggtataagtaatctgacggctgtttccaatctccatgccgactcttctctgcgggtccagcttctccagtttttcttttggaaggacaccctcctgctttcctacccggtgtcccagtccgttatactggtaccttgcctgtttgcctgccgcatccactgcttcttccatacggttcatcgcaccgtaaatatactgttttttccatgccccgttttcaaggatacgggttaaatttcctctcttatcataaccgtactctttgcggattttcccctgtctttcgcttaccagctggttcagggcattatactgataggaggtttgttccccgctttcttctttccatgtacggtttccaaaggcatcataaccataccgtgtctggatctctccgtccttttggatttctgacagcctgcccagggcatcatacccataacggtactgtccgctctcacgctccagccctcttctttccttggtgattccggtcttatttcccaaaaggtcatacagataggtgtagcggtcaagaataccctctttgtcttgatgcaccagttctgtcagctggtcctttctgtcataacggtaggtagtctttgttccattcgggaactgcttttcacacagtcttcccaccggatcatatccataggtgatgacgctgtccccttcctttaattctgaaagacggagctgctcatcatagccatagaatactgtctttccatccggataggtaatgcttcttctctctcctgcttttccataggtataggatacttccgcttccgtccgggtactgcaccttttctgccctgcccagtgcatccggggtgatccttgtgtttcccagccagtcctgtatctcaatcagctgccggagcggattataggacagcttcacttcctttccatctgcatactggataccggataagtctccctgttttgtataggcatacttggtcagatacccttccttatccagttttccaagaagctgcccctttttatcataggtataggtttccttctgtcccagtgcatccatcgtttctgtgacctgtccccgcaggtctctggtataacgggtgatctggcacaaccgtttccttccattctgtttctctgcttccagaaggtctgcatccataccggatccttctgtatcttccttcaggctttcctttgcaccatactggcggatctcgatgagccggtcacagacatcgtattgatattccgtttcatttccaagggcatccgtcaccttcgcaagctgcccgcttaaggtataggcataccaggtcgtgttcccttccccgtctgtcatggaagtcacgtttccaagggcatcgtaggtataggatttcctctccccttcacttcccataatctctacgatacggtccatgctgtcatatccataagtcagcacaaacccggtggcaagggtatgggtttccaggtttccgttggcatcataggtaaaggcttcctctgtcccatctgcgtatcggattttttccaataatccgcctttttgatatcggtaacaggtaatccgccctgcctcatcggtaatgctttccacatctcccagtggcgtatacgcatagctgcggctttcccccagctgattggtttcctttatcagatttccgtttccatcgtattccatggataccctatttccaagggcatcctccgcctcgatgagatttccttccccgtcataccgataggcatagtggagtccttcttccccgttgacttccaccactcttccaagggcatcataaacaaacgtggtctttgccccgttttcatcttcctccccaatccggtttccattggcatcgtaggtatagcgtaccacggcgccgtctgcatacttgatccgggatagcaggttctcttcgttataaagataggtcgtccttgcaccgtccggtgctgtcactctggcaaggttccacatgctgtcataggtcaggagggtttcccttccctctttatcaatgaccttgcttggacggtttaagacattatattcccttcggatgctttccccgtcaaagtccgttacctttgttacttttccgctggcattgtattcatagctctggcagtttccttctgcattttccacacaggtcacatttcccatgatgtcataggtgtaacgggtaacattcccttttccgtctatgctttctgtcatccggttcagggcatcatacccataccgggtgacatttccctgtgcatcttccatcgctgtgatgtttccccttgcatcataggaaagcatgatcctgcttttgtctgcctgccggatggtctgcggccacccggacgctgtataggcaatctccatttcattcccaagggcatctttggtttttacaagtcgtccctgtgcatcgtattccccgcacagtttttcctttccgtttatcttgatcccggttggctggttcttttctccataccggatttccgtcttatttccaagggcatcgatcacgcgcaccagatttcctgccggatcataggcatactgggttttattccccaggcggtccacatataaggtcttctgattgttctggttataggcaaagcgttcctccccattgctgtggatatgcttgatatcccgatacttatcatcatggacataaaccacacggcttccgttccgctcggtaagctccaccgttttcttttcctcgtcatatgtataagacatctgtgtcccgtccgggaacttctgcaacgtagtgcggttctcctcatcaaagaagttttctaccgtcacaatctcccttgggttctccacctgctccagtttcccctgcggggtataaccgtaacgaaaagcattcccgtccggaagtgtggcttccttcaaaagttctccctgataccggtatgccacgcatcttcccgtatggtcttctacacgctccagcatgccctctgtgtcatagaaaaagacaaagaattcccctgtctcctttttgacctttaccagacgaaacggtgcttcctcttcataagcaaacgtgatacggctacccgtaagagactcggtttccaggcatttcccttctttgttaaagcggtatgttttctgagctcttgtacgataagtatatccgtttttctctttttccaaagcaccttcgctgacaaacagggaaaggtaacggtctttttcccagaagaaccgctcctcttttccatcctcccgaagaagcactgcctccccgtctgaaaactccagatgcacctcataattatggttccagtcttttccaagcacgcccctgtgtgcattgatggcattataaaaacggcggaaagcaaaagactcccttccgccgacttccagatctgtccggtcatagataaagtttcccgtgcttaaatttaccgggtccttggaaaaggcatggcagatggcttccgctcccttgatgtttgccatcagcttttccactgccttttccccattttccgttaccttgttccaccttgcctgcacctcttcaaaggcttttttgaatgctgagtagtccgtagtaagcggcgtatctattaaaaactgctccatttcctccaaaagtgtctggaggcttttcgttacccctgcaagttctcttgtctgggaggcatagtccgtatcggctgccgggatcaagtcgcaggctctttggcggcatttctccaattttgtcaatgcggtctccatctgttccgtctttaaggcactgcgtaactgagaaacgtcatggacggctatcccataacgggcttcagaaggcactgcgtccagtgcttcccctgcctggtctgcataagtcctcatagcagacacatgctccttgcactgttctaagatgcttttgatatccttacacagctgtgtgatctcgcttacctggaatactctcttcatctatcttccacctttctttccttactttttacccatttgactagcgcctgtggtatctaattctataaactcagatgctgcaaatcggatgctctctgaaaatttcttcaatgtattacataaagcagttgccaacgcactttctactgttaattgctcccgtagtgcatctgcctcatctccaaaggcttctgataaacatttatttaaatctgaataaatcttattaatatcatcttgcactgctcctatatctgatacagccccattaataatggattctacactgtttatatcaatattaatattttttaccatctattttcctccttagcaacacgtatccaagtctgctatagcattcttgaaactggcaataatagaagcatgcgaagaataaacttgttccatagaggctctggcatcatttaattcttcacataaaagatttacttttggagaaattgcatccgtatagaattctccatcttttcctgtcaattcttgcaagtctttgataactttttcgagaagttccaatatgatttcatgctttccctctaaagcacttttcaaatctgtatagttttcatcatttactgcaattttatctgccatttcactgcctccttatattaaacttctcttatatttaattctactttcaagttgtgaaattttatcgtcaattttttctatctgcgttcccaaactacttactaaatccccagttctttgaatagcagtatcattttcttctttcgcatcatttatataattttccaatgcatttgccatttcaccttcaaaaatccctatctgctttatttcttttcctttcagttctcccaatttttctttccattcttcgcattcactattgcacttctttttagcactttctactttcttctttgcatcttcgtattcttttatctgttcttccaatacacgaatatcgctttttatccctgctattctacgttcctcgtttttctttttgatatcatcccaaaaatctcccatactctttcctcctgcaaaatttatcatttctactgtgcagcatctgtcggctcctgagtctgtggttcttgtgtagaagtattttcctgcacggcaccgtctattttttctacggtttcttcctcttttggttcatatttatcaccaagtttttctatttggctttccaattcatcaagacgctgtttctttttggaaccgtctatcttagtattattttccaaatcatcagcttctttcatatacgcataaatcaaaagtttatcgtctgacagagacaaggcaatttcctctgcttttttcgtttccagccttcctattcttatccaatattccaaaattttcggattactacttgttgaaagattatcaataatatttctcatctcgtcttgacggaaactttccatattagcataagaataggctaaaatatacagtgtgcctttctccatatcagctggttccacctctctcaaactatcaatacaggttcgataatctttttggataaaagcttcatttgccgccaataattgcctttgttctggaactgttttcaaagataaatatgccgcatagccaccgcctattaatgtaccaatcaaagtaataattgctacgattctccataaagaatatgtagacttctttactttctgcatctgttgtgactgctctgtaacataatctttttttacgttacacaaaacatctgcaatttcttcaacagttttacacttataaattggttcaaaccacttttcttccttacagatttcaattccactttcttgaatctgttttacagaatacttacttcctaaaactcctgccacaaaacttttgtaggcatttaaaaaataaacatcatccggcttttctccacgtccataaatatctctatcttttaaatataacaatccatttacatcgtagtacaaattttcttctgttaatttcaaaaggaaatccgcttgaagttcttttaacttagaaaaattaatcaatatctgatatttcttttctcgactttcagatttcacctgagtaaaagggttcattccttttacagtataataaaaatataagtcttccctgtcctcttcataacgacaagataatagtccatttctttttacacaaagtttcttataatcataactatcctttgcatgaatagcagattttttgatttcttcttttaaaaattctatattcttttctgtttctatctttggttgtttcatattagaagtttctaaactcttttttctcatttcaatctattcctctcctaatttctcccgtccctgcgaaattatcaatatatcccctgtataaatatgagattcttcatacgtttttctcatgttcaagcgtcgacttgtcctttctgattgcacttctggttctatcccaattccctgcatagactctgggagattttctcgcataactctcaacgtagttgcaatcttctgctgattatccagagaaatatcataagtttttccactccattcatttttgattgttatggtgattttcattacgttttctcctatacttttctatgaaaaagaggacaactccagccaatatagcgccaaatataccatatgcaatattcatatattgattattggtttcattgttctcattatattctgttttaataactgcggttgtatctgcttgcataactctttgaaatgcggtttctgtaatttctttttccggattattcaaaacattcaaaaatatttcattattcttctcttcttgttcttcctgataagccttttcttgctccataaattccgaagtatacatgtggatgccaaaacggtcacataaggaagtgctaatattttcatttttttgtaagatttctgtatctaagttcagtcccggctgagactgtgtattttcctgtccttccatttgtacgtcctgtcctccttttaagaaaagccgccattatacattggcggcttcctactttcattcatatttacatttgtccagccatatcgctatctgcctgtgcaaagttatcagaaattttctgcatctgaacagccatatcttcaatcatctgtcgtacattcttaagtcccggttctgcttcctggaactgctctacataacgtttgctggtgtctgcctcccatacatccggaagaccttcaattacctgacgcattctatcaatacattcttcaaatattgctccctgatcctgtaaagtttttgaaccggctgccagagcctcataatccacacgtaacatatttttttcctccttgtgaaatgtgatagaaaataaagttctaaggaactttacatcttctgaaaccatgcgattttccgcaaataatttttctttattttacacttttttccagttttttacaacaacttttttgaattttattgtgtaattcgctcattttatttatctatttctccatactttcgtatagttttcttgcacttttgtcatttttgtcattttattcaatattttaaatatcaaaataaaaaggatatttccaacgttttcaactggaaataccctttttatttcatttataaatgatcttcgtttgaatctatgcgtttctttctaaaagcaaaataacttcctatgcaaactgcaagaagaactactggaataacccaaataaaaatcggtgtttctttttcttctacttcttttttctcatcagaaacttcaacatttacttcctgaccttctaaattctctttcttggcaactgtaagatcatttacagataatggctctgtcataaaacgatatgccataatattctcttgtgttccaagtcttgaataaggtaaaactccactaatatcatttaacatgagtttattatcttcgtatgtagactgttttaaactctttgcatttgcaagatttgtatctaatttttcattagatgctttttcactagcctcaatactttctgattgctttttcgtattgtcttcagaagccttataaacctcctctacataactttcatactgcttattctggttttcaatcttctcttctaccttactctgattcttatctaaagattgttccaattgtccaagtgcttcttgatttaaatattcttgcggagtataccttaaaagtgcttcatctaattcatttttcttcaaatctgtattatcgtaagctcctcttaaatttgttacctgagctttgatattcttatctttctcttgtaactcatcatttactccattaagaatgttacctctatcttgagcataagcctcagacactttcatcatctcattcattgcatttcttatagcgtctacatccacatttacatccgaaaattttggctcttctatttgattttttaacctataatttttaatttgaattgaatttaaatcttctacttcatttatattaggttctacttcataaatcggtgtcggaattacactttttatatagttctcccactgttcatcagaaactggtaaatatgtctctggttcaattgcttctaattttgaatataactttttgaaattttcttttaagtcattcaaagcaggatttttttgaaaatcactaatagtattataatagttcgccaaaccattattcttttctattatatgttgattttctaatgccactaatttctcatctacgtctttttttcgataaaaagaataggtattttcttcatattctacagaatatccgtcacactcctcttccgaagaggcactactatcagctgcaccccatctttctatatcgttctcatccttattaattttaattataaattttgattttgcaatatattccttcgtagcactttctatttctttcagtttatctggaatcccttctaacgcttcaatactactatctctaataacacccaactctttttgttctgctggatttgtatctatatactccggatactcatatggtgtcatgtgcatattaaaagcctgtatcgcttcatgcatactgccttttccatataacgtttgattcaattcgccaatttttgaagaaacatttttatattcctcatcgcctttgttccacgcctcttgataagtcttatctatctcagccaaaagtttatcttcttcttcatagtgtggaacaagatccaaaacttctatattcttttctactgttgcaagttcgggtaattcaatggtttcccttaagtcatcaccacttacttctccaagtgcttttaaatcacgaacatcattttctttgatgtttcccgctgcatcttgaactttatgcacctctgtcagtacagaagataaatacagttcactaattccattattcaatgtcgtgtatgcatttccaacagaataaatcgccttagcctgtgcatcctgtgtaagatttggtgcaattgcatactctaaaactgccttttgcggcgtaccgttaatagattcaacagcttccgaaaatgttccaggtaaaatcatatatgcactatattttccgttttctataccccgctttgcatcttcaagtcctgttgtttcatacttaacatttaatgttcctaacaaagattgactataactaataacatcatcttgcttctttataccttcatctgcatttacgatggcaatcagttctgtatcatataattcttctttttggggcttcttttcatttaataatgctactggttccgtgtcatctttactatttagattccccatatagtatccaccacccaaacaacatcctataaccagtatgcctaaaacagttttcactaccctacttttcacataggtttcctcccttttcgtaatttctgaggaaaataatcttttcgattttcttcccaaactaagaaacatccctttgaagcatatacacggttgtctgataaataagtgatgtctttcgttacattttacactattgataaattcttagcaatatttttcagcaaaattcaccattatttttccttatacttctaacatctatcttcttcattatcaagaagaactttcctcataaaattccaaaaaagaatatctttacaagtaaattttatatctgatttttgattatccgcataaacactatactttcaaacattttgaagtatagaaaactattcattttaccacgaatttaccacgattgaatgagccttgatatgacacaaaaacaacatgggagatagcacaaatatctgtgtatctcccgtttttcattcatgtagtatgattattttactctgatttcaaatttcaagattgctttcatcatttctgtatggatttgaccttttaattcttcatcaacctgcataatgattttaccactttcagagtggtaaaacggacgcaagcataatttacatatataagcgtcataaaacttcaaaatctctcttatggcagtttcatttccagcagacgcttgacatattacttttaatgtagggtagccatattcttttttcattggttcaattcctttctttcaatactgtttttagtttcttcaatccgttacttcttctgcgataaatagcagaacgtgatacatgatataattcggctatttcttggtcgctcatactttgaaaatagcgtaatagaattacatcacgctctttattcgataacttatataaagcaacagcaagtttctcatttgatatttgaattgtaaaattcaagacttcaaacgaaatgtaatcacaagaatagttatccttagttacacattcaacatttttcgtatctgataattcacagaataaaacttcacgcttagaacgtcttgcaaactgtctgtttctgttttttactgtgcatttaataacagtcatcatcaaagcattaaactgtattctaacgatatgctcgaaagaagatgggttcataatctcacctcctttccgcatacgctgaaatatataaacggagataccgtctatatctttggaaaatacaaaaagaagaacaagaaaaaagtccgtacaaaatataccgtctgtacgaacttttaatattgtaaaatatttagttgttgataaaatgctgttaggtagtgcataatcgtataagattattcctaaaactttccacagcagttactttcaatgcttttatatcttgcttttttagtcctatcataataacctttcttatcataattgcaaatttataaattcattagtattaaaactgaaattcaaatacattactaaaatcattgttcaagacataataaactttatttttttctgtagaatatacaaatgaaaccctagttgcccacaagtcttttttgagaaacagattttaatactttaaatgcgtcatttactgaaaaatctttatcatatcctgccaataactctttagccacttcgtatcttgtatccccagaaacaatgtacggctttgttatatctggttttagaatagaataatttgtaataagtgaaaaattttcttgttcatatctatacccaattccgggttcaataattaaaactcgtccttttttatcagaaagcatagcttgcatagtagcatctggtgcataaataatttttttctttttaacaatgtccaaggctttatcaaaagaaatctctgccttaatgaatttttctgttaattcagatattgtaatacaatcctcgctttctatataccttgcattttcattaccatgaacataaagaagtgttcctacattaccatttttatttatcccatgaaatgaatgatacataccgtcaggcattttaataccaatataaaatctattttcttcggtaattacagtatgatcccatacagaaaggtcaatatcaaaattaaaaccaacaattttatctataccattgtaaacaaatcttgtacacatataatcactcctcaaaatactacttcaaatagttatttaactaattcaattagtattttaaaatgtttttgtaggaaagtcaataaataatcataattttctaattgtgttattgactacactaattcaattagctagaattgtgtttgtatgatattttgaatgaggtgcataactatgaaaaccactaaagaagcagtaataaaagcaacatcagacttagcagatgaaaaaggattaaataacgtttcgttaaaagctgttgctcaaaaattaaacattcgtacaccatctttatataatcacatagaaagtttagataatcttcttttagaagttgctcataatggtatgcgtgacatgaatgaaagaatgatgaaaattgccgttggaaaaatagggaaagaagcaattaagttagtttctatcgaatacctaaactatatgattgaacaccccggagtttatgaaacaattcaatgggctgtgtggcacggaacagaggaaacagcaaccatttttaacaactatctttcattattaactactcttatccaatcgtgcagtcttaacaaagacaaaacacttgaaatattaaatatgcttactggaataattcacggttatacaactttgcaattaggaaacgctttttctgcctcagataaagttagatttgaattagctgaagcgatagatactttattagtcgggattttccagaagtataaataatatatttaggcttgcaaatcaatacagaactgcaagcctttttcttttatccaacaatcttccagttactattccttatatagcccaaacttgtaccgtgacaatttcattgatattatccgatttaccacaaatcaaattttatcttttcttcctcttgattaccctccacagaaaagaaaaagccctgtcaagagccttgccaccattggtggtgctttgcactctttactgggctttttgtttgctgtatcttctacaaagaggaaaaaagttattcgtcctcatcatcaaaatggttatttttcaatacttcccgtaataattccatatcttcttttgaattggggtttatcatttttacgacttgataaggtgtcctatatttatgtccctctatgctttccccgaacatatccatgctgtataaatcatcatagcggtctaacagtttttgaaacttcaaatgctggataaattctttgattggataaaggtcggacgctacaatacttttcccgttgatgtagtcggtaatatattcccgtaacttttccaactcatattccagccattcttcctcgctgtcaaagaagttgtcataatgtccatgttttagttctgcatttaatcgttcttcaattcttaaaaactggcagacttccttttcggattgattaacatacttccattctcccgataataattcattgggcattacacccagcacgtccattatcttttctaatgtatcaaaggtaggaaaattcacacctcgttcaatcttggaaaggctctgcatattgataccgattttatccgcaagttcctgttgtttcattcctctgtgttttcttatggtctgtatgttttctcctaagaaactgattttcttttcataatgctccataacttagtataaccgctcctttcgttgcttttcttggtatttataagcatatcatacttaatctacatctaaaagtcaacaaaaacttcttgacaagtaattctaatggcgttattatcgtatcagatagagtgattaagcacgatagggtcaatcacacgcttgagtaagcatagagaagatacattttcactttgatagcatgaataagcatggactatcagaccgaaaatagtggtttccaaaaggggctggctggacggggcacgtcccccagacgtgttcggacagacagttccttttggaaaaggaacgcctaaaggcgttcgcagagggcgtatatgtaacaccgccctgcgcatacatgtcatagtacctagaaactgtgataaataaaggaaaaaacacaatttttaccccgcaaaaaacgggacatacgaaaggagtaatgcactataactacacacaaaaatttatccgttaagattgattacatcagcattgtatttgaaacggcaactgctgaagatgtcatcatgcacattttaggtttaccgactgacattttcaatgtctatccggcaagcattaaatacaaaacctatcaagcacgctggcagattggagatatttatgtatcgggcgacgcaagaaaaacagaggataacccacaagggttaggctgttatcttgttatgaccggcagagggtgtgatgatattttccgtattctcgacagtaggaattgtacttttggggatatgttcaaacattgtgagcgaagatacggacaggataacttccacttcacaaggcttgatattgccattgatgataaaaacgaaaagccattttttaccatagagcagataaagaagaaatgcgaaaaagaggaatttatctcgaatagtgagggctaccactttgacgaaagcaagtttgatgatttcgacaccgcaaagactgtttatatcggtgctggtaaatcgggattgtcctaccgcttttatgataaggataaggaagtctgttcaaaacataataagacgcttgaggaagtcggcagttggaaacggacagaaatgcaactgcgtgatgataaggctcatgcttttgccatgacattcaaggaaagaccgctggaacttggagaactggctttcggtctattggcaaacaacctacgctttgtcgtaccaaacagaaacgaaagtaataagagcagatggaaaacttgtcggttttgggaacgctttttaggggctgtggaagtcttaaaactgcaagtaccaaaacagcaaaattcccttgaagaaacacagcaatggctcacagagggtggcgtgatttccgctgtcaaaagtttttacttcttggaagaacatgacgcattaggcggactggaaaaagtgggaactatgcttgataaggcaagatacagcaattccctttccagtaaattaaccgcccatttacagaggataaaccgcaccgaccttatcccctatatccagtatgacacgaaacatgggaaagggggtatctgatgaataacaacgatattcccgtatgggaaaaatacacccttaccattgaagaagcgtcaaagtatttccgtatcggagaaaacaagttaagacgcttagcagaggaaaacaaggacgctggctggctcattatgaatggcaaccgcatacagattaaacgccgacagtttgaacaggttattgacaaattggacgcaatctaatgcaaatgagccttgtatgtgttatgatgaacacaagtcatatcaaggctctttccaacaaggaaaggagcagacaccatgaaagaaaaaagacgggataacaaaggtcgtatcctgcatactggagagagccaacgaacagacgggaaatacttatataaatatgtagacgcatttggaaacacaaaatatgtgtatgcttggagattgacacccacagacccgacaccaaagggaaaacgggaaaaaccctcacttcgtgaactggaacagcagataagacgggatattgaggacggtatcgacagcacaggcaagaaaatgacgctttgccaactctatgccaaacagaacgcacagagggcaaatgtgaagaaaagcacaataaaacaacgggaacaactcatgcggttattgaaagaggataagttaggtgctaggagcattgatacgataaaaccctctgacgctaaagaatgggcgttacgcatgaaagacaaaggcttttcctacaataccattaacaaccataaacgctcgttaaaagcgtcattctatatcgccatacaagacgattgcgtaaggaaaaatccctttgatttcaagttaagtgaagtcctagaaaatgataccaaagagaaagttgcattgacagaggaacaggaacaagccttactctcattcatcaagacggacaatgtgtatcacaagtattatgatgatgtgctgatactgttaaaaacaggacttcgtatctcggaactgtgcggactgacagtagccgatattgatttcaagaatgaagttgtgattatcgaccaccagttactaaagagcaaggaacaaggctattatattgaaacgcctaagacgaaaagcggaataaggcaagtaccattaagcagagaaacgatacaggcatttcaacgggttatgaagaaacgcccaaaggcagaaccatttgtgatagacggacggggcaatttcctatttgtcaatcataaggacaagccaaaagttgcgattgattacaacgccttatttgtccgtatggtaaagaaatacaacaagcaccacaaggacaatcccttgccacatatcacaccgcatacgctacgccatacgttctgcacaaggctggcaagcaagaacatgaacccaaaagatttacagtatatcatggggcattcaaacattagtatcacaatgaattggtacgctcatgcgtccatagataccgcaaaatcagaggttcagcgtctaattgcatagaagtatttaccacgattttaaccacgcttgatagcgaaaatataagaagatagacctagatatgtgaggtttaccacaaaagcaaaatgcccgtagagccgataaaataaggctttgcggacatttaagaagatataaaaagatagtcaaaaagacatatataattttaaagaattaccattataaataaaatttccccattctcctttatcattgcaggttttcttttcttgtttatttttcatatagattcccgtcaatcaaatcataactcatatccaaaaagtctaaaatttttgcttcgctcaccgttccatccaacaatatcgtgatccagtattttttattcatatgatatcctggaagaaaaccataagtttgtgtcagaaggccaaccatatccggctcacacttcacattgatgatatctaccatcccttcctcttccaaacccaattttgatttttcaactcgcagaatagctgcataccactttccattcttatgccggagaattgcactctccggagaactcttccaaagatattccggaattgttccatattgtttcttcacatattcgtaaatctcttcccgtttcaagcattccactccccagttcttctatattgatcaatcttacgattgtacttttcatattttaacaggcaggacatctgccctgccttcctttcctattatagcattgttattcaagctctacaattccatctatcattcattttcctgtttctaataaactaccattccatatcccataatggaattggaactgatcgcataacttctctcttttaccgcatcttcactatttccttctatggtatagacggttattccgtcacagcgttccacgattcctacatggtcgcatgttccatcatgctcccagtcaaaaaagacgatcgcaccgggacttggcatactcccagtcccctgccatttcccctgattctgaaaccagttcttaccatccgtacaaagggaaaacttgggaaccgcaccactttgaatcaaacctgcctgatccgcacaccagctgacaaagcaggcacaccattcctcccggctggtaaatccataccacgaccaaaacttctctccgccttcatttccaagctgactttttgcaatattgacaagctgtctatttccaaaaagtccggtaaaccaaccgccaccggaataataccgcatcacatgaggcacatactccggatcgccataacccgaccagccatgggctgctgcctgctcctgggaaaactgtagcgcattgactttactgtaacctccaaatttttccaacgcccacgagatatatccattcccataattatacccctgtaggctgagtttcagcttgtccatatcctgtggactttcacacccagcttctctgacataatccgcataatactgtatccccaccttgatggaatagtctgcatcctgaatcgctccgggtgtatttggatactgggtgttataaggacactcactagcctgcatgggatctgttcccctacctccgctctcctgcatcataatggcttggattgctgagacatattccgggataccaaattcactggcatacttttgaatggcaggcgtatgtgccagcacttctgcgcttaaaacctcactactttgggaatttcctaaaaaggcagcacctccaatgagccccacaatcagaatcagaacgacaaacactgcgcctccacctgccatcagtgctgcaaatgcagctttcactgcatgagcggcggcttctgccatggcttttaatcctcttccggttgcctttgcagtctttgcactttgcttggcagtctgaaccgagtgtatggtagcccattttgcttccctggctgctttcatggatttctgtgcttgctttttctgtaaggctgcatgagtttttacctttttggaagaaatcagagaagttttcactacacggggcgctgtttttaccgtccgatttccagcttccttgatcgttttctcggcttccggtttgagtttaatgcttcttgtggcttccgttcgccctttctttgccattgtatgccctgcctgggtagatgtgccacccactcctgtttctccctctaaaggggatgtcgcagtttctctctgcttttgtttctgcgcctttaacttctcataagttttcactgccagcttttttccaccacgataggctgccgaagtgctttcctttccaacccgctgttccgcccgttctatccggtttccagcatattccaccggagattcctctccggtttctcttcccaccttgtctgccgccatccgggatttctctttcgtttccagcatggcagaacgcaccagttctttgggaagccgggaggcaggattgcggatcttcgggttcttatcccataccttctctttgatgtctttcaaacacacacctccctgtatcgcattaccgttccctactctgtttcttttgtctcttctgctgttcttccagcctttccagttcccttaccgcttcctgcaccagcggatgattggcataatagagaacacaggacagcaattcccttcccctctcacccgttactaatggatactccccttcgttataaagaggatcgtctgcatggtgcagggaaaactccaaagacggacccatctgagaggaacgcttgcaaaatctctggtaatgccaaaacgcttcttttaaagatgtgcattcgatgcattctcccatcccatggaactccccgcactccgaagcaagaaaggtaatggttgtttcttctttcatggctctcacctgtctcccttcaaatcttttcctaattttctgtaaaaaaaagacaggcacctacacgatgtctgtctctgtgggatctaccatcccttgttcctgatattgttgttttataatttattccagctgtttccgaatttccttatccggtacctggatgcaaaattcacggatccatcgctcatgcagatgctcatctgcttctgtcgactcccaggacacgatgctgcaagtctcatcatataacaattccaactgccgaaactgttcgccaaactgtcctgaatacttattccagatttccaggttatataagtttagccctaaaaaatctgtcacatacgtcagcctgtctaaatctgaaaacgtcatcttttcttttcccaataagatttccctgtcacgcttcccacataaaaacaggaaagcaaaccgttccatatccttttggtgcatacccatcacccttcttgtaaataattccttattacgaagcatttaagaaatcttctgctgcattttcatttccaagtagaatctgttccactaattcgtcatcactcaacacgcatcagactcctttccattgaatatctgtatatatataataacgggttatgcatttaaaatgattaaaagattcctcatttttttcatttcaacgcataaagaaaagtcccataaacattgagtttacaggacttaaccatatcttatcttatattatcgtaactgttcagagccaacctccaaaatgctgcgcatttcgtcggtgtggcgtatccgccagataaaatttcaaaaacagttttaaaaatgcaagcatttttaaaactgttttttgaaattttgcttggctctgaacagttacatattatcttagaatttcttaattagcaaattccctgagctgtcatagcctctacaaccttctcaaatccggcgatattagcacctacaacgtagttacccttgaatccgtatttctcagctgcatccgtcatgttgtggcagatgttaaccatgatgtttttaagtttagcatctacttcttcgaatgtccaactcagacgttcgctgttctgagacatttcaagtgcagatgtagcaacaccaccggcgttagctgctttaccaggtgcaaagataacaccattctcctgcagatactctgtagcttcgagagttgtaggcatattagcaccttcacatactgcaatacatccgtttgcaacaagtgcttttgcatcttcaaggtgaagctcattctgtgtagcacatggaagagcgatgtcaactttaacattccatacccctcttccttcatggtactctgaatttggacgatagttcttgtactctgtaagtcttgcacgtttcacttctttgatctctttgagagctgcaacatcgattccgtccggatcgtatacccatcctgtagaatcacttactgtaacaactttagctccgagttcctgggctttctgagttgcataaatcgcaacgttacctgctcctgaaacagcaactgtcttacctgcaagttcgataccattgagtttcagaagttcatctgtcagatacagaagaccatatcctgtagcttctgtacgagcaagagatccaccataggaaagtccttttcctgtaagaactccttcatatactccacggattctcttgtactgtccgaacatatatccgatctctcttgcgcctgtaccgatatctcctgcaggaacatcagtatcagcaccaatatatttgcaaagctctgtcataaagctctggcagaatgccataacttctctgtcagattttcccttaggatcgaaatcagatccacctttacctccaccgattggaagtcctgtgagggagtttttgaaaatctgctcgaaaccgaggaatttgataataccaaggtttacagatggatgaagacgaagacctcccttgtatggtccaattgcactgttgaactgtacacggtatcctgtgttaacctgtacctgacccttgtcatctacccacggtacacggaacttaaactgtctctcaggctctacaagtctctcaagaagagcgtctttacggaatttttcttcatttgcttcaatcacaacacgaagagactccaacacctcttttactgcctggtggaattccggctctgcaggattcttctttacaactaaatcaatcacttcatcaacgtatgacatcttaattacctcctagaataaatagattgggattcctgtctccctgatactattgtatctttcgtcaactgatgtcttttctaaaagaaaaaacaaactgacaagcaatctgttacctcagacaccgttgtctactcgtttattttataagctaaatgaaagattgtcaatcattaattgcattattttaaagttttatcactttaagttgataaaactgcatgaaccaatgtatcaaattgcaattttcagcatatttaaggttatatgttgagtaaacagatgggaaaatggtgcttttccataagataacctgcattgtatgccacaatgcgcattctaagcggagcgtttttaatatattaggacaggactttcctaatatattaaaaaacagagtactgtttccagtactctgtccatttgcacatattagttatatttacgttttctagcagcttcagatttctttttacgtctaacgcttggtttctcgtagtgctctctcttacgaatctcctgctgaataccagcctttgcacagtttctcttgaatctgcgtaaggcgctatctaacgtttcgttttctttaacgattacatttgacatagtctcacacctaacctcccctccagccttgtattgtgcatcatacgactgttcgggtatatttattgcactggatattattataacatattttttcaaaacgtcaactgctttttatgatttttaccgattttttatacttttttctcgcttctacccaaaagagaatctgccacagacagattctctttacaatgactttatttaatctgatcagccagtgcttcttctgcttttgcaagtgcatcctggattcctgctgggttctttccacctgcctgggccatgttcggacgaccaccgccgcctccgccaacaaggcctgcaattgctttcacaagatttcctgcgtgtgctccctgcttcattgctccgtctgttgctgtagccatcaggcttacttttccgtcatttcctgatgcaagtacaaccacaccttcgccaagcttctctttgagctggtctccaagatcacgaagtccgttcatatcaacaccgtcaagctgtgctgcaagaagcttcacaccttttacttctttcacctggtcaagaatatctcctgctgcgttctgagccatcttgctcttaagactctcaacttctcccttcagagacttgttctctgcctgaagatgtgtgatcttctctgcaagattctccggagttgcttttacaagctgtgctgcttctttgagaagatgctccatctcagcatagtagttcataagtccttcagatgtcagagcttcaatacgacgaacacctgccgctacaccactctcagaaataatcttcagtgctgtgatctctgatgtattcttaacatgtgtaccaccacagaattcaacggagaatccgctcatatctacgacgcgtacaacgtcaccgtatttctcaccaaacagagcctgtgctcctgtctttcttgcttcctcgattggaaggttctttgtcacaactgcgagggcatttgtgatctgctcattcacaattttttcaaccttcttcagttcctcaggtgttactgctgagaaatgtgtaaagtcaaaacgaagtctgtctgcatttacaaaagatcctgcctgctctacatggcttccaagtactgtacggagtgctttctgaagcagatgtgttgcactgtggtttctttctgtaagtgcacggttctttgcgtcaacttcaagagttaccgcatcaccaatcttgatcattccttttacaacatgtcctacatgtccaacctttgttcctgcaaggtgaatacaatcttctacaacaaactctccgtcggctgtacgaatcacacctttatcagcttcctgtccacccattgttgcatagaatggagtctgctcaacgatgattgttcccttttctccatcagaaagtgcatcaacaacttctgtctctgttgtaagagctgtaaccttagaatcaaatgtcagattgtcatatccgacaaattctgtcgcaagtgctgcatctagctgatcgtatacagaaacttcttttcctgtataagaatgagttccgaatgttccttctgatttcgcacgctgttcttcctgtgctttcttgaatccttcctcgtcataagtcagccccttttcttccaggatctcacttgtcagatcgattgggaatccataagtatcataaagcttaaatgcattctctccggaaagaactttctctccattcttctccatctcagcttccatatctgcaaggattgcaagtccctgatcgattgtcttattgaagtttgcttcttctttcgcaattacattaaagataaactctttcttctcttccaactccggatatccatccttggaaccttcaattacagttgttgcaagctctacaaggaatgctccgtcaattccgagcagctttccgtgacggcatgcacgtcttaacagacggcggagaacatatccacgaccgctgttagaaggtaagataccatcagaaaccataaatgttacggaacgaatatggtctgtaacaacacgcagagaaacatctgtctcatgatctgttccgtactgcttgccggagagattacatacatgatctctcagtgctttcattgtatcaatatcaaacatggaatctacatcctgtacgatgcaggcaagacgctcaagtcccatacctgtatcaatgttcttctggatcaggtctgtatagttgccgtgtccgtcattgttgaactggctgaatacgttattccagatctccatgtaacggtcacactcacatcctactgtacatcccggttctccacatccgtatttttctccacggtcatagtagatctcagaacacggaccacatggacctgaaccgtgctcccagaagttatcttccttaccaaaacggaagatacgttctgcaggaattcccatcttcttattccagatttcgaatgcttcatcatcatcttcatatactgaaggatataatctgttcggatcaagtcccacaacttctgtaaggaactcccaggaccactcgattgcttcattcttgaaataatctccaaaagagaagtttccaagcatctcaaagaatgtaccgtgacgtgctgtcttaccgacattctcgatatctcctgtacgaatacatttctgacatgttgtcactcttcttctcggcgggatctcctgtcctgtgaaatatggtttcagcggagccattcctgaattaatcaggagaagactcttatcattatgtggtactaaagaaaagctcttcattgcaagatgtcccttgctctcaaagaactccaaaaacatttttcttaattggtttactccgtatggctgcatacatccatcctcctctttcgctcataaaaagcctattttgtaatataccacaacagcctccgtttgtaaagcggaggccggttattgtccgtatatttacttattttaattcaatttcttccagttctttcggtggaagtgctctgcttgagtttttgacataagctgcgacatccttcttcgcagtcgggattggaatattcgttccagctcctgcaacacatccgccaggacatcccataccctcgatcagacatccgttcattcttccggctttggcaagtgtcaggatcttcttacattctgccagaccttccgcatgctcaatattaacctgcgttccagggtaatactcgttaatacattcttcgattgcctttgcaactcctcctgcacaggcgtatccacgtccggctcctgtcgcatcatggaaagaagactctgcctcataagctgtcagatcgattcccttcgcatcaaacattgcctgcaattcttcaaatgtaacaacgaaatccacatcacttctcactgtacgtctggaagcttccagcttcttcgctgcacaaggtccgataaatacaacctttgcattcggatgttcctgtttgattgttcgtgctgttgcaaccatcggagtcagttcctgtgagatctgatcgatcagatccgggaagaacttcttcgcaagcattgcccaggatggacaacaggatgtcagaagaaatggaagttctccggttgtcactttattcacataatgatgtgcttctgcaattgctccgatatcagctccaagagcaacctcatatgtctctgagaatccgagttcttcaagagctgccttgaaatttctcacattaatattcggtccaaactgaccgacaaatgccggtgctacctcagctacgacctcttctccttctgaaagtgcacgagccagctggaagatctgagacttgtcagaaatcgcaccaaacgggcagcttaccatacacattccgcaggaaacacatttgtcagcatcaatataagcacgtcctaatttatctgatgtaattgcattcactccacatgctttcttgcaaggacgttctttcttggcaatcgcatcgtatggacagacagatttacactttccacacttgatacatttatcctgatcgataaatgactttccattcaccatggaaatagcacctctgggacagacttcctgacagggatgtgcaagacatcccttacatacattgctgacctcgtatttattctcctcacagctctcgcatccggacggaatcacctgcatcagcggtggctcatagtatttctcagaaatattactggcctcaacgcctgctgtcaagtggaccggcttattctccggacgaagggaaagtcccatcgcaagacgaagtctttctcttacgactgctctcgcacgataaatactctcacggtattttacttctgaatcttctccaacgatttcatatggaattgcttccatatctgctaccaatgtctctgcatttgctttaaatccaagcttggcaacttctgtaaacacttgtcttcgaattgcacgaaccggtgtctgtaatcctctcatttttgatctcctcctattctttagttccaaaaactctctgtgcataatgaaccgactgcatggcatctttgccataaaaatcagctcctatcatatcagcatactcctgattcagaacagctcctcctaccatcacaaggcaattcggagctttctctctaagctgtctgatcgtctcttccatactcacaacggtcgtagtcatcagcgcgctcagtcctaccagatgaatctcctgctcaagtactgtatcaacgattgtctccggcggaacatcctttccaagatcgatcacatcaaaactatagttttcaagcagaaccttcacgatatttttaccgatatcatgaatatccccttttactgtcgcaagaatgatctttcctttcttctcctgcacttctccgctgctttccattttctctttaagcaccgcaaatgctgccttggccgcttcggcactcatcagtagctgtggcaaaaagacggttcccttctcaaatccttcgcctaccgtattcagtgccgggatcaactcttcgttaatgatctccagaccatctttctcctggatcatctcagatgtaatgctgttcgcctcttcacgaagtcctctttcaattgcacttttcagtgtcatcttgtgagctgaacctgttaccaagaccggagctgttcccggctgctgtgcatatttattaatataattctcacagttgctgtccagattcatcagtgcatggtatgcataccatgccttcatcatatcctccgagttcggattgataattccaacgctcagaccattctgcattgccatcgtataaaagatggagtttacaatcggtctgcttgggagaccgaaagaaatatttgatacaccaagcacagtacacacaccaacttcatcacggagtctgcgaagtgtctcaagtgtcactttcgcaccttccggttctgaactgatcgtcattgccagggcatcaattacaatatctttcttctcgataccgtattttgctgcctctgcgataatcttcttcgcaatctgtacacgtccctcggctgttgccgggattccgtcttcatcaagtgccaagccgatcacaacaccgccatacttccggatcagtggaaacactgcatccattgactcctgctttccactgactgaattgaccatcgccttaccattgtaaatgcgaagtgcattctccatcgcaaccgtatcaaccgtatcaatctgaagcggaagattcgtcacactctgaagttcctggacaacttccttcatcaatgtcggctcgtcaatatccggaagtcctacgttaacatccagaatatgtgcaccgttatcctgctgtgcaattccttcttttaaaatataatcaagatcatgttccttaagcgcctgtttaaagcgtttctttccggttggattaatacgttcaccaataatctttgatccggttccaaggaacacactctgaccataagaagataccacagtataacttttcttctcaatcggcttcaccggaatgtctttacactgcttcaccatctctgcaatatgtgcaggagttgttccgcagcatcccccgatcacaactgccccaagatcaacaacatgacacataacagaagcaaattcttccggagaaacatcgtaataagtttctccgtctttctgcttcggaagacctgcattcggtttgacgatcacaggcacagaggaatacttcatgatctgctccaggatcggcagcatctgctccggtcccattccacagttgattccaagggcatcaatccttaatccttcaagcattgccacaacagacggaacatctgctccggtcagaagctttccacgctcatcaaaaatcgtcgtagcgaaaaccggaagagatgtattctctttcgctgcaagcactgctgccttcagttcataagtgtcactcatggtctcaatatggatcagatccgcaccggctttctctccgaggatcataacttctttgaatgtctcatacgctgtctcgaaatccagatcacccatcggttttaaaagctttcctgtcggtccgatatccagtgctgtgtagattcttcttccaccacctgcctcttcagccgcatccttcacatgcccgatcgcaagacggataatttcttccaatggaaaatcatcgcaatggaatttcaatgcattcgctccaaatgtattcgcaagtacaatatcacttcctgctgaaatatattgtttgtgaatgtttttgatttcatccgcatgtgtaacattccatgtctccggtaactctcccggctgaagtccctttgcctgaagcaaggttcccattccgccgtcaaaatataataactcttttcccaggcgttctcgtatcatcttcttgtatcaatccttcctctcttatctcttgcttatcgtcggtattcacaatctttttttgtacagacctcacatcctgagattggacatctgtccttctgtgtactgattccaattactgctgttaccgactttgttggtgtcatcataaagctgtctgtcaaagtcagcccgattgtctttgcacaattcaacattcgtacgatcggttcttgataacagatgtcaaaatctccatatccgggactgaatctcggtcttaaatacaaatgttcttcttcaagctctgccgcaatcttcttctgacattcatcgcaatattcttctaacattgttgctgcacaggactgcaaaacaactgctcttgccatgtctgtcaaagagatcctgcgcatcagccggtcaactccggcgccaagtgttgctccaaaaagaacaacccgacggcatcctttcagatttctactcaggctcttactttgaatctccatctgtccaataaccagtcttccgtcttctgtatgattcaggtcaaaaatttggcagatggacttaggccctgcttcctgttccaggtctttgaaagactgttggatcagttccaaggttcgctcatctgcctcatttcttccaaatcccagataacgaactgcttcacgtactctcttctctgtctctatcatctggtcatccactttcttaacacttgataatctcggaaagattattcataattgctactgcaatttccggcttattcatagaataaatatgaatattgttcacaccgttcgcaagaagatcaataatctgatctgttgcatagacaattcctgcctgcttcatcgcatccggagaacttccgaagcgatctaatattgcaagaaatcttctcggaaatactgttccggaaagttcctggcttcgcttcatctgagcagcactggtaatcggcatgattcccggcagaaccggaactgtgatccctgcttctctgattctgtacaggaaattataatggatatcattatcaaagaacatctgtgttgtaaggaaatcaactccactgtctaccttctgtttcagataacggatatcatcctctttatgttcctgctccacatgtccttccggataacatgctgcaccaatacagaaatccccatgtttcttgatttcctgtaccagttcataagcataatggaatcgatctccatcagggaatgtcatgccttccggaatatctcctcgtaaagcgagaatattctcgattccatgagccttcaggttttcaattacctctccaacttcttcttttgtggatgaagcacatgtcagatgtgcaagactcatcactccgagatcatccttaatatgggatgcgatcttcgctgtgttcttgcttgttccgccaccggctccataggttacgctgatataagatgggttcagtttggcaatctcatctgttgctgataatactttgtcaaatcctgcatctgtcttcggcggaaacacctcaaaagaaatgtggatgcctttctggttcagtttgtcaataattttcatcgggtctgttactccttgctcttgtgttactcttgtattacttctttgttacttcttataattcttattctccaatcagacttctgtacagatcttcatactgtcttgcagaattcatccaggaaaaatcctgagccatcgcgcgttcgatcatcttgttccagtcacgtttcttgtcataatagattctttctgcataacgtacagtgttcaacatctcatgcgcattataattagagaaactgaatcctgtacctgtcttctcaaactcattgtacggttctacagtatctttcaatcctcctgtctcacgaacgatcggaagtgttccgtatctcagactcatcagctggctgagtccgcatggctcgaataaggatggcataaggaatgcatcacatccggcataaagtctgtgagaaagatcatcggaatagaaaatattcgctgaaacctttcctgcatacttccatgcaaagtgacggaacatattctcatatttcggatctcctgttccaagtactgcaatctgcactgcatcctgacacatctcatccatcatataatcgatcagatcaaatcctttctggtctgtcagacgggaaacgattccgatcaacattacatgattgtctttatccagtccaagttcttcctgaagagcagccttattcaccggtttgtttttccggaaattctcaacgttaaatgtctttgcgattctatgatctgtatccggattccagtcattgtaatccagaccattcacaataccgcaaagatcatttgatcttgctgccatcagtccgtcaagaccttctccatagaacggtgtcttgatctcttctgcatagctgtgacttactgttgttaccttatctgcataaacaataccgcctttgagcatattagcatctttgtatgcctcaagcttatccggaacgaaataataatccggaagtcctgtgattccctgtacagtctttgtatcccataccccctggaacttcaggttatgtattgtcataactgtcttgattcctctgtaatattctccaaagaaacggaaattatccagatataccggaatcagacctgtctgccagtcatgacagtgaatcagatccggacggaacccaataaccggaagaatacttaaaactgccttacagaagaaagagaatttttcaatattccacttcggatctccatcatatggagcaaatcctgaaaaataaaattcattatcaataaaataaaatgtaactccatttaattctgtcttaaagattccgacatagcgatcctctcctgcaaaatccatgtagaagtttgtgatatactccaggcgctctacccactcctgtttcatacacatgtacttaggtaaaactacacggcagtcatatttctctttatcaaaatcttttggaagtgaacctacgacgtcagcaagacccccggtctttataaatggtacacattctgatgaagcgaacaaaatgtttttcatacttagatcctccactttcacttgccctctttcggcaattacttataaaatattataccgcatttttatcataatgcaaaggatttctcattgtattttacttcttattttccatgcctgtattccaattgtattgtatctgcgatcagagcaataaattcagaatttgtcggttttccttttccattgcttactgtatacccaaaaagttcatccagagtgtccagctttcctctgctccatgccacttcaatcgcatgtcggatcgcacgttctactctgcttgatgttgtctgatacttctttgcaacggttggatacaggatctttgtgattgcattgagcacatccatatcatctaccgccatcataatcgcatctctcagataatgataccccttaatatgagccggtattccaatctcatgcagcatatttgtcactcgtgtctccagactttctcctctgttatcagataccgcctcagagcttcttgtttccataccgtgtgacatccgccccgcacttcggattcgttctaacaacatctcattttgaaacggtttcatcatatagtaatttgcacctttattaaaagcatcttctgtaatcttttcttgcccaactgctgtgattacgataaaatacggatgcttgctgacagttttgtcatgattgatccgatccatgaccgtcaatccatccattttcggcataatcaggtcgagaagaacaacatctggctgtttatctttgatgatctgacacatctcttcaccatttttcgcctttccgaccagattcatgtctttttccatcccaatcacacgatccaaaagatccaaaattttctggttatcatcagcaatggctattttcaaatgttccatcttcttctctcctttttctgagaacgtttgtcttgttacaccactcgtgtattatattccagcttttttgtcggattcaagaaaatcttgcagtagtatttcgacatccttttcgacccttttcacgattcttcctctttcaacatattttcaataaaaataccgtatccttttgtcgaatcctgtacaaacacatgtgtcacagctccgatcagttttccattctgaatgatggggctcccgctcattccctgaataatgccccctgtcttttccagcaattccgtatctgtcacctgaattaccattcctttgtttacctggtcggattctttgtcaatttgtgttatacagattgtgtattctttcacctcaccatcaatgtagcagcgaatccttgcctctcctgtctttatttcctctttttttgctacctgtatcgaaacttcctttcctatccagcttctgtctgaatttaattctccataaatacccgcatccgtatttttctcaatcgctccaagctgatgaaaccgattataaacaataatcccttccattgttccgggattccctttgcttcccttttgcactttctgaatacttgttctataaagcgttcctcttttgatcgtaagaagtgtacttgtatcaatatcatgtataccatgtcccagtgctgcgaacctgttattttttgtcaaaaatgtgattgtcccaagcccctgtacattatctctcacccagattccaagtcgataatttccttttgaaatctgcacaggagtcaatttcttttctaatatcgtattttcgcgtctgactgtcagaaggaccttctctccatccagatgttccaccagatccatcaactgtttttttccctcaatcttctggtgatttacttctgtaatataatcaccggaactcactacaccctgtgcaggtgtatattcctttccatccatccccgtcattttctccgtgtctaaaaccagtacaccatccgtttccatataaattccaaccggcattcctccaagtagaaccgtatcgtcttccttttccgcagccagactttccacttcccgaccactgacttccgtattttccataaatcctgtaatctgtgcacagccacataacatcaataagcagaacagaaacaacagacctgtcccgctcatattccttttcctgcgttctttcatgatccacactcctctcttgcaaatattaaaagcagatgctgtttgcatctgctcttagtatgtgtggatcttcttcttttcacactggtattatttttctctttttgccagttccttcatttctctggcactgtctatgattccatctgtcacatttgctcccccaagaagtcttgcaagctctgcaacagagtcttcctgatcaagtctctcgatctgtgttctcacagaattatcttctgcctctttatgaatgcaaaaatgaacatctgctgccgctgcgatctgtgaaagatgtgtaatacaaattacctgacgactctttccgatcaactgcagtctctcaccgacacgacctgctgtgattcctgatattccactatcaatctcatcaaatatcaaagtcggcgtatcttcttcatctgcaagtacagtttttattgcaagcataatacgagacagctctcctccggatgcgacatcccccagtggacgcacaggttctcccggattaaccgacagataaaactctgcatcatcttttccttgtgcggaataactttttgcttctgttaaacgaatttcaaaacgtgcatccaggaaattcagttccgacatctgatgaacaatctcctcggcaaatttaactgcgttttgttcacgcacttcatgcagttccatcgcagctttttccatctgcttttctgctttctcctgcttctccaaaagttcctgcataaaagaatcgtaatcttccagttccgatagtctctgccttttttcctcacaatatgcaaggatatcactgacagtgtttccatattttgcctttaaatgattcacttcattcaggcgggactcaacttctgaaaactcttcttccgaatattcaaaactctttgcatattctgccagatcccggttgaaatcattcagcagactatcgatctccacgatctgatcgtaaagctggcttcccttttcatcaaaagatgctgcttcctgaaggcttcggattgcacggcttaagtaatcacttgcatttccacgttcgtcctctgcagtatactgatacgcttctgcaactccttctgtgagttttctgctgtctgtcatcttgcgatactgttcttctagaaattcatcttcgccttctttaagcgctgcttcttcaatctcattcacttcaaattcagcaagagaaagttctcttctgcggctctcttcatctagcgaggattgttccaccttcttacatactgccttccattcctgatagcaggaagccattttctcttttaacggattcgtctgttctttcccataaagatcaagcagtgtcaaatgattctttcgatgaagcaatgtctgattatcatgctgtccatgaatatcgatcaaaagactggctacatctttaaggacgctcatattcactgtctcaccgttaatcttactgacacttctgccttctaaaaggcggcggctcaatgtcagatatccgtcttccggataaatgtccaaggcctccagcttctttaaaatcttttcttctttgatatgaaaagtaagttctaccaatccgctttttgccccgtttcgaagcatctgtgcattgtattttccacccagtgcaagcgtaacagagccaagaaggattgactttcctgctccggtttcaccggtcagaatattcaatccttccccaaactcaacttctgtttcatcaatcaaagcaagatttttcacatacagattctgtaacatatatcacctatgctttccttgaaaccaatttccttatattctccattactacagctgtatcttcaactgtacgaattgcacacatgatcgtgtcatctcctgcaatacatccgaccacttcattccatttcattgcatctactgcagcggcaaccgccattgccattccggcaactgttttaatcacaaggatattctgtgccatatccatggaaacaaatccgtcacaaagtacacggatatatttttcgctcattccatcctcttcctgtctatggacaatatacttctgacgcccaccgtttacagacagctttgtcagcttcagatctctgatatctctggataccgttgcctgtgtgaccttgaagccggcattattcagatattctgccagttcctcctgtgtctctatgtcatactgactgatcaattcaattatctttgcatgtcggctcactttcatagtatcaatttcctttcatcttctcgcgcattgttatcataaaactttcttcacttaattttactagatgcgctttggcatctgattttctgatcttcactctgtctccgctaaccaattgcctctgtacagcaccgtcgtaacataaagctactttctcctgccttccataacggccctcgcaaatctcaacctcaacatcatcctctgctgaaagcaccacgctgctcgtgttaagtgcatgggaacagattggagtgataacgatcagacttgctgttggctctaccaccggtccacctgcggaaagattatatcctgtacttcccgtcggtgtacagatgatcacaccgtctgcctgatatgtgttcaacaatgtcccattcacatacacattaaactgaacaatacgaagattcccttctcttgtcaggacgatatcatttaccgccagatctttttcaccggatgacattgtcccctccaacatcatacgtttctcaactttaggctcttcctcgcaaagtctgtcaatcgcagatttataatctttcaattctacatctgccaaataccccaatgttccgatattgattccaagaagcggaagtttatttccttccaggtcacgtattgcacggatcagagttccatccccacctaaaaccagtccgcaatcaacgtcctccggaatcgttcccggaacaataaatccttcctcatccttttgagcaagaataacacgtttgccttttctctcaatataatcttttatctcaatcgtaacagaataatctctgtcttttaattgatttgttatgatataaaaagattccataccatcacctttttactttgccagagcagcgaatgcttcatccactacctgatccagttcctttgtctcaatctttgcttcctcttccggacatttcttcaaatgtacaaggtattcgatatttccttctggtcccttgattggagagaatgtgatctcaagtacggaaaatccgatggataccgcaaattctgtcactttctcgatcacttcatgatgcgtactcttttctcgcacaacacctttctttccaaccttctcacgtcctgcttcaaactgtggtttgatcaatgctacgatctctccatcatctgtcagatacgctctgattgcaccaagcacttttgtgagagagataaacgaaacatcaatcgacgaaaaatcaacaggttctccaagatcttccggagtcacataacggatattcgtcttctccatacataccactctcggatcctgacgcagcttccaatccagctgtcctcttcccacatcgatagcaaatactttctttgctccattctgaagcatacagtctgtaaatccgccagtggaagatccaacatctgtacagacctttccatctactgtcacatggaattctttcattgctttctcaagcttaagacctccacggctcacataagggagaacatgtccgcgtacctcaatatttacctcctccggaaatgttgttccggccttatcttctctttgaccttctacgaatacatttcccgacataataattgcttttgctttttctctggaatccgccagattcctctttacaagcaatacatccaaacgttctttcatgttacttttcttcctctattctccgatcatctgcaatgaccttttttacaatactctctctgtcgagaccaacttcttttcttaagacatctacatttccatgctcaacataatcatctgaaataccgattgtgcgaactttcaacgggatcccctcacgcattacaaaatcttctacctgctcaccaaatccacctgtaagcacattttcctcgattgtcacaaggatcctgtgattttctgaaattttccggatcatttctgtatccagaggtttcacaaatcttgcattgatcagactacactgataccctgctgccttaagatcctcacgcacctgttctgcaaggaaagacatatgtccgacaaacattaccgcaatctcactctcttcatatagaagctcactctttccatattcgatcggagcacggaattccttcagcccttcgtatgcttctcctcttggataacgaagcgcaaccgggtactgaaaatccactgcaaagcgcaccatatctgccatctcccaacggttctttggtgacagaattgaaagatttgggatcgatgataaaaatgataagtcaaagactccctgatgtgtctctccgtcacttccaacaagacctgcgcggtccactgcaatcacaaccggcagattctgaagacagacatcatggatcgtctggtcaaatgctctctgtaagaaagatgaatacaccgcaaaaacaggcttcattccccctgcagcaagtcctgccgcaaatgtcatcgcatgctcttctgcaattcctacatcaaagaatctttccggaaatagctttgcgaatctggaaagtcctgttccgtctgccattgctgcagtaatagctacaaccttcttgtccttctttccgatatctgcaagcactttggaaaaaatatctgtataagaatccttccccgatcctccgatcgcttctcctgttgtcacatcaaaaggtcctgttccatggaattttgacggattcgtctctgccggaagataaccctttcccttcttcgtcacaacatgtacaagaactgcatgatttacccgttttgcttcattcaatgtctttgttaatgtcttcagatcatgtccgtctacaggacccagatatgtaattcccatatcctcaaaaaacattcccggaacaaataattgtttgatcccgctcttcgtcttcttcacctgatggacgatccgttctcctctgccgggaattctcttaatcgtatcttcgacacctctcttcaggtctgaatatacctgtgtcgtccgaagcccattcaggtaatttgacataccaccaacattcttggaaatggacatattattatcattgagtacaataataaaattacttttcaatctggaagcgttattcaatgcttcatatgccataccgccggtcatagaaccatctcctatcacagatacaacgttataatgctcctgttgaagctctcttgcggccacataaccaagccctgctgagattgaagttgaactgtgtcctgtatcaaacgcatcacatttactttcttttctcttagggaatccactcattcctccgtattttctaagatcatcaaatccttcttttcttcctgtcagaagcttgtgtgtataagactgatgtcccacatcccagatcagtttatcctctgggaactgaagtactttatgtaatgccatcgtaagctcaacaactccgagattggatgccagatgtcctccggtcacactgatcttttcaatcagaaactgccggatctcatccgataattctttcagctcttcctctgtcagttcttttatatcgttggccttttgaatcttttcaagtgccataagttcctcctcaccgacaatcttatttttctctatatacaagagatttcaaaagctgctcaaggaaattatccccggcagggaactttttcagttcgtcgattgcttcttctgtcatacgttccacatctttatgagcctgttcgattcctttaagtgttacatatgttgtcttttcattcttctcatcactatgtaccggcttgccaagctgctctgtcgtgcttgtcacatccagaatatcgtcctggatctggaatgccattccgatctttcctgcgactttctgcatgctcttcacatcttcttttgatgctcccgcaaggattgctccaaccatcatagcagactcgatcagtgcgcctgtcttcagtctgaaaataaagtcaagaacttcctcatcaatctgatgtccggattctttcacatctacaacctgtccaccgatcataccatagattcctgcctttcttgccagaactctcagcgcttgtccgattctaaggctttcctctggaaattgctcaaatgccttgcatgctgtctcaaatgcatagtttaaaagcgcatcccccgcaaggattcccatatcttctccataaacgatatgtgtcgtctttcttcctctacggtactcatcattatccattgccgggagatcatcatgaaccagtgaataggtatggatcatctccattgctgccataaacggataaatcacttctgtctctccaccaaacagacggtatgtttccatcatcagcattgggcgaaggcgcttgcctcctgccatcagactgtattccattgcttccatgatcacactctgatatccgtttgcttccggaagatattctctgagtatcgcttcaattttttctactttttctttctgttcttctttaaaattcatgactctctccattctcatctaaggcaagaaccttcttttccacatcgtcaatcgtacgattacaacacttcacaagttccataccttcctgatataaattaaaagaatcttcaagagaaagttcctctccttccagtccgccaatgacgcgatccagtctctcaaataactcctcaagacttgcagcctgttctatcttcttcgtgtctttcatcatttcctcccggttactgtttatgggaactttgtcctctttccccttctagttttacagtgcctgtaacgtaagtctcaatctgtccatccgttacataaatctgcaacaaatctccttctcttacctgatctgttttctttatattctgtccttgtgcattgcaaacataagaatacccctgacttaatttctcaagcggagacaaccctttcatccgttctgcacaaagtgcgagtctgtgcttttcttttgtcagatgccgttccataagcgagcgcagtatattctcagcgtcaactgctctctgtctcttctcattgagtttctgtcttggatggagtgcctgaagtttcaatctgctgtgctccagatgcatacgctcgtttagcaacttctgatttattgctcttcgaagtaaactctcacaattaaggatctgttctttcacttcggaatattcatacactgcaagctctgccgctgcggatggtgttggtgctcttaagtctgccacataatcggcaatcgttgtatctgtctcatgtccgactgcagagatcaccggaacacgacagtcaaaaatcgcacgcgcaacagcctcctcattgaatgcccacagatcttcaatgcttcctccgcctcttccgacgatcatgacatccacctgcttctcttccaacatatggatccctttcacgatactgctcacggcaccatcaccctgtaccagtgcaggataaagcaggatctggacaaatggattccttctctttgccacattgatgatatctctgatcgctgctcctgtcggtgcggtcacaaccccgatcgtacgtgcatagcgtggaatcggctgtttatactctgctgcaaacattcccatctcttcgagttccttcttcagtgcctcgaatctttcatacaaaagtcccgcaccgtctaaaatgatctctcttgcgtacagctgatactttccatcccgttcatagacgctgaccgcacccagcactactacctgctgtccttcctccatatgaaaagaaagcccagaccttgagcctgcgaacatcacgcaggctatcgtgccggactcgtctttcaatgaaaaatatatatgccctgatgtgtggtactttaaattagacacctcaccctttacatagattcggttcagcatgaagtcctgggtgaacatattcttaatataagaattaacctgcttcaccgtatagacatttttcattctttcgtctcttccagtgaacgcgcaatcttgccaagtactccgttgataaatgacggagcctcatctgaactgaacatctttgtcagttctactgcctcgttaatcgcaactcctaccggtacctcgtcatcccacttcatctcatataccgcaagtctcagaatggacagatctactttgttcattcttgtcgtcttccatccctttgcattggcattgatcagttcatcaatctcttctgtcttctcaagtactgccgcatattttctcttaatatattctttatccttatccgctgcatcttccagtgtagaaaaatagtattcaatctgctccggcatctcctgcggatcattaaattctatctgaaacaacatcttgaaaatgtgctcgcgaagttcttttctaaccatgttggctgattcctttcctgttcgcttttattcctgactctccatctcgactcctgcaaccttaatgttcacatcagccacttcaagtcctgtcatattctcaattgcattcttaactttctcctgcactcttgcagacacctcaacgatgctgtaattgtacttcaggttcaatgccaaggatacagtcacaataccttccagtacatcaaccttcacacctttggaaagattcttcattccgagctttccgatcagttcattcgtgatgtttccggccatagaagcaacaccttccacttctgtggcagcaagcgctgcaatgatcgctacaacttcatctgcaatcttaatctcacctttgcttgcgtcgttctgtattgtataaatatttctttcgtcctttgccataatcaaaacctcctgttttgtctgattctttctacattatatcaaaaatctttctatttgaaaagatttttatgaacgtccgaattctgacaaaataagtccttcatttctctcttctgtcatacggatactccactcatgcgcaaagagaagaagcggacgtcccttcagatccatgatcttcttcatatcagatgttccgctcaagcgatccatatcgatctcttcattctcgatccaacggatgtactcatatggcagattctccagacggatctccacattatattcattctgaagacgatacttcaatacatcaaactgaagtacacctacaacacctacgatgatctcttccatccccgtgttgaattcctggaagatctggatcgcaccttcctgtgcaatctgattgattccctttacaaactgctttctcttcatcgtatcaacctgacggacacgtgcaaagtgctccggtgcaaaggtcgggattccttcgtaagcaaatttctcttttgatgttgtcaatgtatctccgattgaaaagatacccgggtcaaatactccgatgatatctccgccgtaagccttatcgatcatctttctttcacttgccatcatctgctgcggctgggaaagacgcacatcctttcctccctgcacatgataaacactcataccggcctcaaattctccggaacagattctcatgaatgcaattctgtctcggtgggctttgttcatattcgcctggatcttaaatacaaatgctgagaagtctttttctgtcattggatcaatctcgccatgatctgattttctcggaagcggagaggttgtcatcttcaggaaatgcttcaggaaagtctctacaccaaagttggtaagagcggatccgaaaaataccggtgaaagctgtcccttatcaaccagttcctgatcaaactcagctgctgctccgtccagaagttcaatctcatctgcaagaatgtcttttgcatctgctccgatcagttcttctgtctccggtgcgtcgatcggtatcatcttcacttcacccatcgcagtaccttttttcgtgtctgagaacagctcaacttcacgtttcgctctgtcgtaaactcccttgaattccttaccggaaccgattggccagttaatcggacaagttgcgattccaagctctttctctatatcatctaacaattcaaatgtatccttcgcctcacggtcgagcttattgataaatgtaaaaattgggatgtgacgcatcacacagactttaaacagctttcttgtctgcgcctcaacacccttggatgcatcgataaccataactgcggaatccgctgccatcaaagtacggtatgtatcctctgagaagtcctgatgtcccggtgtatctagaatattaatacagtatccgccatagctgaactgaagtacagaagaagttacagaaatacctctctccttctcaatctccatccagtcggaaaccgcatgcttcgcagttgcttttcccttaacagatcctgcctggttgatggctcctccgtacagaaggaatttctctgtcaatgttgtcttaccggcatccggatgggatataatggcaaatgttcttcttttctttatctcattcgtaatttctgacatttctaatctcctatcattttcacgcaatagataactgtccgcaggcatcctgtagacagttacataataaaccagtaaatagtgtatcacaagtcctctctgacagcaaatcttttataaaaagtttttccaaaaatatactttctattcatgaattggtgtaattacaatcttctccggctttacatccgactttcttgtcacaatatcctcaatctgggcacggtttgcatccgtaagctcctctgcatttacaacaacatctgcactatcttcccccagacttactactgcctctgaaaatccttttgttgccatcaatgtctcaatttccatctccgtctctgattgttttgtaagctccaccatctgtgcaactgcatctgacttttcctcttcactgagctccgtattgtctatgatcgactgcagtgtttctttattctgggcacgcacctgttctcttgtaacttttgcctgggctaccgtagtctgggctgaaccatttgtgagaaccgcctctccaggtgttccttctgtttcagaatcattactttcaatttcttcgcttcctgcttctgtatcttcctgtgaaatatccaaaagttcctgatttgtaagatctgcattagcttcttttgttcctttcgcattctcgccaaacagacgtcccgtgtagttcagatatcctgctgccgcgatcataaccgcaagtgccacaatgatcaactggtttttcttcacttttcctttcattaagataaacctccttttatgtaggcgcacgtttcattatttttatcttatgcgcttctacaccaaataatgcctgcaccgcttctgtcagattcttcgcgacaactgcattcccacctccatctgctattacaagaatgccctccacttccggtgcattttctttacttacatatggagtctgcgttccgtctgtcccctgactgtacacggtcgttttatccagagatttctcttcactttctcttgtctctccctggctgtctgcttccttcgtcgtctgatgtgtgctttgctgatctttttcaaccaccttctgtcctgtagactttaatgtgatcatcaccgtcacctttcccgccccatctacaacaccaagtgtctgcgctgtcttctgttccagatatttttcatagtctgccatggaatctgtctcatacgtctctcctttcccggatttcccgtcaatctttgtatccttatccacctcccctgtcttcggaaccgtaaccgcaactacaagaagcagcagtccacacaggaataaaatggctaatcttgttcttttctgaccacgatccgcctgttttatcttccttgtgtatcccacgatcctttctttccactcctgccaattattgtccaattccgatttcctcccgttttatagaatccgacatccgctctatttctttttcatattgctgatacacttccctttgataaaattgctctgctttcagtcctttcaacgccgcaacaggggatagtgcaagcaggatcaggacaagtccacagaaaaaacgaatatatttttcataatcttttcccggaattacctgcagaactgcactcatgacgagaagcattgaaatgattttttgtatccattgtgtaagcatccggcagattcctcctctctcctctgaaaccttaagatgttacagccaccacaagtgcaatgcttaagacaaacaacagtgttgtggatgctattaccttcaccataagctgataaccggaactaactccagatatgcatgttgtaattctccggtcagaaaccggttggactaatgccgccacaagttggtacaaaaatgccaatatcagaaattccaccagtggaataagtgccaggacagctataaaaatcattcctgctacaccgattccattcttaagaagtactgcaactcctaatgcaacatccattgtacctccggcaacatctccgatccacggaaccgcctccagtgttcgtcccgcagcagtcattttcaaagaatcaattgccggattcaaaaatccccggatcagactgatcccactcacagcggcaatcatacttttcagactccattggatacatttttccagaagttctgcaaattctgagaaaagatcttctccggtcaggcaggataagaccctcaccatcccgtagatcttcaccgccggtaaaagaaagtgaagtacaagcagttccaccagatagatcaagaacagtattgtattataaaacatcaacgccgaactgctctttccggtaaatgcaaccgccagaaagaaacttgggcaaaacacctgcatcaattggacaagctctcctgttttttcttcggcatataaattcatcgattgatatgcttccagacagattgcgatcacaacaagatacaaaatataaaaacccgcttccgctgtctgtctgttttgaaagatacttgtaaaattcgagaaaaatgcagccgccactgtaatcagcagcaggcgcgccagattcttccttcctttctgaaaaacagagaacacctgtcctgaaaaaaactcaagaaatctttctcccaattcctgcgtatttccgctgatcagcatctctgtaagatcacgaaaccgaactttttctcccagttctgtctctcctgataactgatcgatctgtctgaaatcaaattcatccagcagactttcttccatttgttccagctcaccctccaacatcccggaacgatcttctgtttccttttcctccgctgtaccatgctctgctgcatacacgctgccacatcctgtcacaatagtaaataaaaacacaagacagaagatctttttccaaaaatgtttttcccttttcatatcagaaaatctccgattagttccagcagcgcaagaagtaccggcattcctatcgcaaggatcgtcaactttgtaaaaatctcaatctgtacagcaatattctgataccctgcatctttacagattccggatgcaaattcagccacataagtcacaccggccattttcaacagaatacccatctgtccggcatccagttttatataatttgcaattttctttactgtccgcacaaagatttcaagtcgtgaaagcatacaaagaaataaaaacaagctgactgcaagacttacataaatgccatattcacttttcccacttttaaactgcaaagcaagtaatgttcccacgacacccaaaagtgcgatttgtatactgttcaattctgttccgccctccttaaagagaaaacaattgccggatcgaagaaaataagtcataaatcgccgggagaacccaggataatacaagaatcagccctgcaagacttgtcaggaatgcctgttcctctctgccgctatgcttcaaaacctgactcagaatagatacaagaattcccaccgccgcaattttaaatatcagattgatactcatactctccctcctctcccttttgtttccgcccttttaaagcagaaggatcacaagaaaaatcccgcctgctgcccccagccagctaccgagctttttcttctcagacgtttccgcagttctcttttcgatttccatatccagccttttcaaatgatactccagcagacgaactacaccttctctgtctcctatttcaagcagttccccaggttcgcagatcagaggattcattttccctctccatttcagttccgggagatcttttcctatcgtatctgtccacaagtcagcaaaccgcttttcctgtgtgccctgacattgaaatgccagatccatcagccagttttcataaggttccttctctcttgatgcaatattataaaaaatttccgaaagcggaagtcctgcatacagtaattcgccttttatttgttctataattctgcgaaaatgactcaattcttccagataattccgaagttcttttccatacatccatcctgctccggtcgtcgccagcaggatcagaaaacatccgactaatttctgcacagcacacgcccccgctcatcatagatttcccggatcttgccaggaccgtgatcatgtccaagcacaacataacgctgaaacattcttctgcggatcaggtcgcccaggatcggctttttagaagcctcatccatatcaaggctgtgtacactcgcgatcagccggcagccgcactgcatggcatattcaatggcatggatatcctcacttgtgccgatttcatccactgcgattacgcgcggcgccatagaacggatcaacatgatcatcccctccgctttcggacaacagtctaaaatatcagtccttgtacccaaatgattctgcgcgattccaagataacacccaccaagctccgatctttcatctaccacaccgacagaacacccttttatgtattcatttccatccgatatctgacggatcagatcacggatcaaagtagtctttccgcaacacggcggagaaatgatcaatgtatggcaaatctgtttattttccgtaatatatggaatcaatgcgtcagcacaaccaagtacttcgtgagaaattcttacatttagcgaagaaatatactgtatattttttactttttcattttctataattacttttcctgccaccccgaccctgtgacctccttccactgtaataaatccctgtttcaactcattttcatatgcatagagcgaataatgacaaatatatcccattgtctcaccaatatcttctttcgtaaccagatacgggtgtgccgggtccggaagaacccgttcctgccctttcatctgaatcagcagcggctgacctgtacgtatcctgatctcctgcagttcctccggattactgacggattcttctacaagtttacggattttttctgccagcagattccagacctgcatcttcttgttctgtctttccatttccatcttgtccacctctccagttgttgtccgtacccctcctctctacacaatatatggataagattcttaaagtattccttgcacatacaagaaaagaggaacaaaacccagttccctgaattctgttcctctttttttattctttctgattcttattctgcaacatctttcatgctgaagctgaatcttcccatcttatctttaccaaggcatacaaccttcacaacatcaccgatgcttacaacgtcttctaccttgtcaactctctgcttagaaagcttggaaatgtgtaccattccttctttacccggtgcaaactcaacgaatgctccgaattctttgatgctgataacctttccttcaaaaagctgtcctgcttcgtaatctgtaacgattgtctggatgtacttcgcagctttctccatgttctctttctctgtaccgcagatagatacatttccttcatcatcgatgtcgatcttaacacctgtctcgtcgatgattgcattgattgtcttaccacgctgtccgacaacatcaccgatcttctgtggatcgatctgcatctgaataatcttcggtgcaaactctccaacttcttttctaggctcagcgattgctttactcataacttcatccatgatgtaagttcttgctttctttgtagcagcgattgcttcttcgatgattggtcttgtcaatccgtggatcttgatatccatctggattgctgtgataccttcgtgagtacctgctaccttgaagtccatgtctccgaagaagtcctcgagtccctggatatctgtcagtacaaggtaatcatcatctgtctcacctgttacaagtcctgcagagatacctgctacagcagacttgatcggcacacctgctgccatcagtgacatactggatgcgcagacacttgcctgtgatgtagatccattagactcaaatgtctcagatactgtacggatcgcatatgggaactcagactcgcttggaagtaccggaagaagtgctctctcagccagtgctccatgtccgatctcacgacgtcccggtcctctggaaggtcttgtctctcctacagagtaggacgggaagttgtaatgatgcatatatcgctttgtcttctctgcttcatcaagaccgtcaagcttctgtgcttcagaaagtggagcaagtgttgtcattgtgcagatctgtgtctgtcctcttgtgaacatagcagaaccatgaactctcgggatcaggtctacttctgctgcaagcggtctgatctgatcgatcgcacgaccatccggacgcttatgatctttgaggatcatctttcttactgtcttcttctgatactggtaaacagcctcaccaagcttcgcaagatactcttcgttgtctgcaaatgcttcctcgagtctctctgtgatcacacggatattctcttctcttgtctgcttgtcatctgtaaatacagcctcttccatctcagcagccggaacgatctcctggatcgcatcaaagagttcctgcggaacagcaaagctctgatactcatgtttcggctttccacactctgcaacgatcgtgtcaaagaaagcgatcactttctggttcagatcatgtgccgcaaagattgcttcaatcatcttcgcttccggaacttccttcgcaccggcctcgatcatgataaccttttcctttgtagaagcaactgtcagtgcaagctcggaaacttccttctgtgctgctgtcgggttgaatacgaactctccgtcaacaagtccaacctgtgttgtagagattggtccgtcaaacggaatatcagaaatacttgttgcaagtgcagcaccaagcatagctgtaagttccgggctgcagtcctgatctacagaaagaacaaggttctcaagtgttacgtcatttctataatctttcgggaacagaggacgcatcggacggtcgatgacacggtctgtcaggatcgcattctcagatgctttaccctctctcttattaaatcctcccgggatctttcctacagcgtacattctctcattatactctacgctgagtgggaagaaatcaattccttctcttggcttatcagaagctgttgctgtacacagtacagttgtgtcaccataatgcatcagcactgcaccattcgcctgttttgccacacggtcaacatccacgcgcagtgttctgccggccagttccatttcaaactttttatacatggttttctcctttttatcttatcttcgttttatatgagcagaacaatttgctccgaaactactgaaaaatgtactattctatagcaattgaaacccactgtagtcgttggataatacacttttcagtggtctcggttcttctctacccataagcttttaaattatatcatattctataataagaagtaaatagttttccaaaaaaagaccaaaaagtaccaaaaattcagacaaaaagaaacagaccagaaaccacatcatcagatgcagcttctgatctgtcaattgatcttctttttggaaaatcttattattttctcagaccaagtttctcgatcagagcacggtatctctcgatatctactttcttgaggtatgcaagaagtcctcttctctgtccaaccatcttaagaagtcctcttcttgagtggtgatccttcgggttagctttgaagtgatctgtcagctcgttgattcttgctgtaaggatagcaacctgtacttccggtgatcctgtatctccctctgttcttccaaattctttgatgatagcctgtttcttctcttttgcgatcattgtaatatcctccttaaaattcttagttaaaccgcctggcattaagcaatggtcggagtgatccgattaccgaacaccggctgatttgatacctcggatagtatagcacagagatatctgcttgtaaagcacaaatttaaaatcttttatctttcatcgaatggatgatttttcagatattcctctccgtaccgcatatctttcatcacgcggtctttgagttcttcaaccgaatgaaatttcgtttccggacgttcgaactccagaatctgcactgtggcagtcttcccgtaagcatcgccttcatatccgtagacataaacttcgaacaaccgtcttttctcttgcgcaacggtcggtttcactccggcatttcccacaccgccataccatacaccatccacaaggacgcgacaggcatagacaccgtactttggcaggattttcttttcctgcggtgcaagattcattgtcggaaatccaagtgttcttccaagctgctgtccatgttccacaacgctggtgatctcatacggataccctaaaagctcatttgcaagaggaacatttccatcgagaagaagttccctgatataagtgctgctgatctcccggtctttgtaatatgctttctcgaccacatcaactgtgtagccatatttcgctgcatatttctccagcatctgatgattgcctcttttttcatgaccaaagttaaagtctgttccgacaacaatgtgtgatgcgtgcagcttcttatataagatctcttcgataaatttctctgcttccatctccatcatttctcgcgtaaatggaatctcgatcagataatctaccttgtcctcaagaaatgcccttcgctcttcatttgtcatcagacagtctctgtccatatcaaatgcacaaacgacactgtcgcaatcttccttctgcgcatatttcattattctgttgagcagcttctgatgtcctctgtgcaatccgtcaaactttccaagcgttaccgctgtctgatttcttccgtcaaaggcatctaatccttttatatattgcatgtctgtcttattcgtcctttatttctcaattttctctgcttcaggatccagaaacattttcttaatatggaatagcttcttcggtgcacgatactgataaaggccgataaaattctttctggaatcatatactctgacttcctgcccatctgtccacgcttctttttctaacagaaaatgttccggaagatcatttccgttataagacatccatgccttcgcatccgtcacagtaacggccggcagttccgcgaagatctgatccagaggagtgaaaagttctgcaccttctccctgttccatcttctgtcgcacttcatccagtgttaccgcatcttctttcaggaaacggccgactttcgtacgctcaagttcttccatacagccgcccacctgaagcttctctccaatgtcatggcataaagtacggatatatgttcccttagaacagtccacctccatacgcacatgtggaagattcatctccagaatgcggattccatgaatctggacttttctgctcttacgctccacggtctttccttcacgggcaagctcataaagcttcttcccattcactttcaacgcagagtacatcggcggaatctgatcatattctccgataaatgattcgatacaggaacgtacttcctcttccgtcagatcgcccggatccctctcctccagaacctctccggaaatgtcctgcgtatctgtcgtctttcctaaaagcagcagagcctcatatgtcttatcatgatctgtcagaagctcacaaacctttgttgctcttccaagacacaccggaaggactcccgttgcatccggatcaagcgtacctgtatgaccgatcttcttctgtccgacaacttttcgaagaactgcaaccacatcatgggaagtatatcctttttctttgtaaatattaactattccgtttatcatttttcctcgtttttctcttctgccactctaagctgtctttcaattaaaagtgtcagattgttgatcacatcatgcggggaacctttcattgtaacaccggctgctctcacatgaccgccaccaccataatatttcgcaactgcacttacatcaacgatttcttttgatctaaggcttactttaaatgtctgcggttcgagctcgtaaagaaggattgcaacctccacacctcttgtctgacgcaatacgctgacaattccatccaggtcagacggttttgcctggaagaactccatttctttcaaacgtatcactgagacaaccgctttcttattcaggatcatcatactctcaagaagtgccttcccaagcatctgattctgaacataggatttttcaaaatatgttccgtcaatgatcgcgcttccattgatcccttttcttaaaagtgcagcaccgacttccattgtctccggtgaagtacaggaatactggaacactccggtatcatgcacaattcccatataaaggaaagatgcgatctctttcgtaatcttctcctcatccagcagacggaaaacaagttcagaagtagaacttgcatccggcacgatataattcgtgtctgcaaaagactcattactgacgtggtgatccacacataaagtttcctttgcattttggaacaccggctcggaaaaaccaagacgtctttcgtccccacaatccagactgatgaaaaggtcataaactttgccttctacaatctcatgcttcggcacatccctgtgtcccatcatctgaaatgcttccggaatctcctccagatacagatctgtctcaatctccggataataagtggtcagataaagatataatccaattgtagaaccaacgcagtccccatccggacgaatgtgtccgccaatggctacactgtgtttcccttttaatacatcgtttaatacgatcatctattcctcagctccatccttcaaatctcttgtcacttcgtcaattttcttgctgatatttactccatattcaatggactggtctacgataaatgtaatctgtggtgtgttgcgcatattcactgtacgtgcaagttctctgcggatatatccctctgcactctgaagacctttgatcgtatcttcctgtgctttcttgtctccgagaacactgatatatgccttgcatgttttaagatccggtgctacttcaacagcaacaacagatgtcagcggtgcaacacgtggatctttgatcccgccacgcaggatattactcagctcacgctgtacttctgcattgactcttgtattcttaatactgttctttctcatgttataactccttttttatacagaaaagttactcctgcaatgtatgacccctgcacgagtaacaattctgtcacctgctgacaattacaacactctgcaaatgtcggcatcttttattcttacttgcgttctgtctctaccatcttgtaggcttcaacctgatcgccttctttaatgtcattgtagttctcgaatacgaaaccacactcatatcctgttctgacttccttcacgtcatctttgaaacgcttcagagatgccagcggtccgtcgaatacaacaattccgtcacggatcagacgaacagaacagtttctctcgaagataccgtcaagcacatacgcaccggcaattgttccaactcctgatgccttgaatgtctgacgtacttccgcatgaccgagaactttctcctcaaagacaggatcaagcatacccttcatggctgcctctacatcttcgatggcattgtagataactctgtaaagtcttaagtcaacaccctcgcgctcagcgatatctttcgctgttgcatccggacgaacgttaaatccaatgatgatcgcatttgatgcagatgcaaggataacgtcagattcattgatcgcaccaacaccgccatggatgattttaacaacaacttcatcgttactcagcttcagaagactctgcttgattgcctctacagatccctgaacatcagccttaacaacaatatcaagttctttgaggttaccttcctggatctggttgaacagatcatccagagacatcttggacttcgtctcttccagaagttttaccttgttctgggaaataaatgtctctgcaaacgctcttgcttctttatcagactcacatcctacgaatacttctcccgcattcggaacatcattcagaccaaggatctcaaccggctgggacggacctgcttctttcacacgtcttcctttgtcatccatcatcgctcttacacgaccatgagcgcttcctgctgcgatcgcatctcctacgtggagtgtacctttctgtacaagaacagttgcaacagatcccttacctttatcaagctcagcctcgatcacaagaccacgtgcggcacggttcgggttcgctttcagttccataacctctgctgtcagaaggatcatctcaagaagatcctggattccttcatgtgtatgcgctgataccggaacaaagattgtgcttccgccccagtcttccggaatcagttcgtattctgtcagttcctgttttacacgttcaacattcgcacttggcttatcgatcttgttgatcgcaacaataatctcaattcctgctgctttcgcatggttgatcgcctcaattgtctgtggcatgacaccgtcatccgcagcaactacaaggattgcgatatctgtagagtttgctccacgcatacgcattgcagtaaatgcctcatgtcccggtgtgtcgaggaatgtgatcttttctccgttaatctcaacaacagatgcaccgatgtgctgtgtgataccaccggcctcacgacctgttacattactgttacggattgcatccagaagagatgtcttaccatggtcaacatgacccataacacatacaaccggtgggcgttttaccataaggctttcgtcttcttcatcctctttcagaagttcttcgattacatctacaacttcttctttctcacagagaacatcgaattccatcgcgatctcttctgctgtctcataatcaacttcctggtttacagttacgatcttgccctgcatgaaaagcttcttaacaataacagaaggaacgatcttcatcttatcagcaagctctttaattgtaagaacttctggaatcacaatctgtttgatctgctcttcctgcttctcttccttcacctgtggcttcttcacttccactgccggtttctgcttcttgccttttcttccttttccttcgaaagcttcatctctgtattctttcttcttattatctctttctttgtctttcgctttgtttctctgtgtcttctgctgttctacgatcggtgtagcgtcacttctgtcgtttctgcgattgtcatttcttctgtcagagcgctgtccctgtccgcgtccgtctcttccgtcacggttctctcttccatcacggttgtcgcgtccctggaatccgtcacgtcctcctctgtcagaacgctgtccgcgaccgtctctgtcctgacgtggtcctctgttttcgcctctgttctcgccattagaacgtctgtctccaaatggtttctgtcccggtctgtcagagcgtacctgtcttccctcaccgctcggacgtcctgttctttctgttcttgatccctgcggtctctcagaacgtgctccgttctgtgccggacgtgccggtctgtcctctgctgcacgaaccggtctttcgctttttgctgccggtttctctgtacgagccggttttccttcaccattcgaacggctctgtcctgctgccgggcgttttccatcaccgtttggacgaccctggttctgtccctgacgtccctgtcccggacgttttccctgcagtctgctgctgttctttgaattctgtgggcgaactacaaatgcaagatttttcttctttggagcaccctctttttctgttgttttatctgcagccatctcagcatctttgccagctgcttctcttctaatatcttctgccacgttatcctccctggtgtttaaactctttttattttcattctgcatcttctcatctgccatataaacctacctccttcaagcaatcaacggggaacctttgtcttctactcccattcatcaggtacgggatttcagttcttttaatattccttttgcaaatccttcgtctaatatcgccagagatgcacggaattgttttcccatcgcatgccccaaggtatctttatctccgtaaactatcattggaactttataaaatttacacatatcacggaattttttctttgtattatctgaagcgtcttctgcaacaactacaaggcttgctcttccggactttgtctgtccttctgtcataaattcaccgcttgcgcagcgccccgctttcgttgccagactgatcagagacagtactttatctctagccaatctcatccatctccttttccagccgttcatatacttcctgcggtattgcctgcttaaaggaacgctccagtcctctgttcttcacagcctgctcaaaacatgccttctgcggacagagatacgctccacgtccgtttttctttccggttgtgtcaatgacaaattcttcttcctctgttctgaggatccgaatcagttccttctttggtttcatctcgccgcagcctacacatttacgcataggtactttcttctttactgccaaacaattcactccctcagatcttactcttcgtctgtctcaacgaattcaatctcatctgctccgtcttcgtcagctgcatctgccggaacatcatcgtactcttcttcctcttctccgactgtatagccttcttctccgaccatacccatctgctccatgtagttctccggaagatctccacactcaattgcctgtgtctcactcttgatatcgatcttgtatcctgtcagacgggctgcaagtcttgcattctggccttctttaccgattgcaagtgaaagctgataatcaggaacaataactcctgcaatcttctcatccggatcagccataacagaaataaccttcgcagggctgagtgcattctcaatcagaagtgccggattctcatcccagttaatgatatcaatcttctcaccacgaagctcttttacgactgcatttactcttgcaccgttcataccaacacaagctccgaccggatcaacattcggatcgttagaccatacagccatctttgtacgggaaccagcctcacgggcaatgctcttgatctcaactgttccgtcctttacctctgcaacctctgattcaaacagacgttttacaagttccggatgtgtacgggatacaaggatctttggtccctttggtgtgttcttaacttctacgatataaagcttaatacgctctgtcggctcgaaatgctctcctttcacctgttcgttctctgtaaggattgcatctgcttttccaagattcacactgatattcttgccaatataacgctgtacgatacctgttacgatatccttctctttctcgaaatactgatcaaatactgccttgcgctcttcttctctgatcttctgaagaatcaggttctttgcattctgtgttgcaatacgtccgaattccttggaatgaagctcaacctgtgcgatatctccgatatgaagtgccggattgatcttctctgcatcctcaagactgatctcgattgcaggatcaaatacttcttcaacaacttctctctctgcgtatacagagtagtcacatgtgttgcggtccataacgatcttaatattatcggatgttccgaaatgattcttacatgcacttaaaagtgaattttcaatggcctccaacatgacatccttgctgatgtttttttctttttcaagaatatccaatgcttcgagtaattctgtgttcatttttctttcctcctaaattaaaaatccaaagcctgacggatcaaagcgatttcttttctgtcaaatgtctgctctgtctcatcttcgtatgtgatggtcactgtattctcatcataactctttaaaattccgacgaactctttctgtcggtcgattgcacggtatgtgcggatctctacttcttctccaagatttctcttaaaatccttctctttcttaagtggtcttccaagtcccggagaacttacttcaaagatataggagtcttcaatataatccttctcatcaaggatatcggagaatctcctgctgactgcctcacagtcatccacggcaattccgcctggtttgtcaatatacgcgcgaaggtaccaggtacctccttctttcacatattctacatctaccagctcaaacccgagttcctctacgataggctcgagaagtgcttctgtctgctgttcataatcttctcttctggacacgctgcgtcaaactccttttcttctataatatagtttgtgatctgattcataaagaattttccatatcaccaaagaagagtgaactttcgtccactcttctgccaattccttatgtaactatatttactctagcacttttccgtgaggaaatcaagggtttttgcacattttcttacaataccttagaaatccccttaactttctctttcttcaccgtctccgcttcctgcaagacttctagcggcttttggttcctgttccatcccgtttcgccagtttcaggcggttcaatgaaactgtcttttctccataagtaatcttcgtctctgttccttcttcaaaaagataaacttcttctaattcatccttcttctgaagcttaattcctctgacaccgacagctgcttttttcttctccggaacatccacagataaaaatctcaggaaatatccgttcttcgtctgaaggacaacattctgatactccgtcacaaccttcactgcgacaagcctgtcttcttcctgcagctttgttgccgcgatcgtgcgcttggatacctggaactcacttccatccacacgcttgatcattccctgtgctgttgcaaacaataattttgaataacgcatctgctcttcttcacagatcataacaatctgttcttcactgcttgaataattacttacattatcaatcggaatccctttgtctctgaactttccatgtggaagatcaagcaccttcacctgatgcatcttgccttcatctgtaaacagacagagttttccaatgttcatacaatgcacaatgtatttattctctttgtctgcagcttctttattcctctcatagactccggtatccactgtcttcgcgtaaccaaagcgatccatcagaaagacgacctgctgctcttcaatcttcttctcttcaaaaacagcttcttctgcattctccacaacggtacgacgctttcttccgaattcttttttataactgtcaagctcttccatgatcacgcctgccatggaatcatagttatttaaaatatcttcataacgggcaatattttctaatgtcttctcatgctctttctgaagtgcttcaatctccagaccgatcagacgataaagacgcatctccagaattgccgttgcctgacgttctgtaaaacggagcattgccgccatctttttggaaatcgcagacttgaacttaatgttttccgtctcaccgtttaccagacaggcacgcgcatcttttacagatttacttcctcgtaaaatctcaatgatcaggtcgatcacatcacatgctttgatcagaccttcctgaacttcactcttctcccgctctttgccaagcaaagttgtatatttcctcgttgcaagctcaaactggaaatctacatgatgttctatgatctgtttcagacttaaagtctccggtctgccattcgcaaccgccagcatatttacgccaaatgtatcttccagacgtgtcttcttataaagcatgttcttcaggttctcaacatccgcaccacgcttcaattcgatcacgatacggattccttcttttgaagactggtttgaaatatcaacgatatctgtcgtcttcttggattccacaagattgcagacatcgtttaagaactttccgattccggctccgatcatcgtgtatgggatctctgtgatcacaagctgcttcttgccgccttttaattcttccacttccacttttccacgcagcttgatcttcccctgtccgctctcatagattgccggaagatcatccttattgaccacaattcctccggtcgggaaatccggtcctttgatatatttcatcagctgctttgtagtgatcttgtcattcttcatatatgccttgaccgcatcgaccacttcgcagagattatgtgtcgggatacttgtcgccataccgactgcaattccttccgcaccattgatcagaaggttcggtacacgcatcggaagcacaagcggttccttctccgtctcatcaaagttcggaccaaaatcaataacattcttatccagatcggccagacatacttcctgcgtgaacttcgtaaggcgcgcctctgtataacgcatcgcagcagctccgtctccctcaatggatccaaagttaccgtgcccgtcaacaagaacctgtcccttcttgaagtcctgcgccattactacaagagaatcgtagatggaactgtctccatgcggatggtatttacccatcgtatctccgacgatacgtgcactcttacgataaggcttatcataacggataccaagctcatacatatcataaagtgtacgacgctgaaccggcttgagaccatcacggacatccggaagtgctctggcgataataacactcatcgcataatcaatataagatttcttcataagatcagaatattctgtccttatgatctgtgattcattactcattcttcttctccttagatatccagttctgcctctgtcgcattttcatagataaaattacgacgcggcggtacttcagttcccatcagcatctccgttacactcgaagccattcgggcatcctcaatctctactcgtttcaacatacgtctctccggatccagtgttgtctcccagagctgctccgcatccatctctccaagacctttgtaacgctgaagtgtgaacggacctgtatgtgtctttctataacgttccagtgccttatcatcatacagatactcttcttctccactctttggcattgccttataaagtggcggcattgcaatatatacatgtccttcaaaaataagctccggcataaagcgatagaataaggtgagcaataaggtagaaatatgtgcaccatcgacatcggcatcggccatgatgatgatcttatcatatctcaactttgtaatatcaaagtcatttccgtatccttcagaaaatccgcagccaaatgcattgatcatcgtcttgatctctgcattggcaagcaccttatcaatacttgctttctcaacatttaagatcttaccacgaatcggaagaattgcctgataatttctgtttctcgctgtcttcgcagaaccgccggcggaatctccctcgacgataaagatctcgcacttcttcggatctctgctctcacagtttgccagctttccgttactgtcaaaagaatacttctgctttgtcaggagattggtctttgccttctcttctgtcttgcggatcttcgcagctttctccgcactggaaagaactgtcttaagtgtatccagatttcgatcgaagaaacgaacaatctcttctcctgttaccttgctgactgctttcgccgcatccgggttatccaactttgtcttcgtctgcccctcaaatctcggatccgggtgcttaatggatacaattgctgtcattccgttacggatatctgcaccggtaaaattcgcatccttttctttcaagattcctatctctctcgcatactggttcatgacagttgtaaaggttgtcttaaatcctgtcagatgtgttccgccctctgcattataaatattattacaaaatccaagtacattctcatgaaactcattcacatactgcagtgttacctctacttcaatcccgtctgcttcccctttaaaataaaccgggtcatgaagcacttctttcttacggttcagatcctggataaatccaatgattccttccggttcatgataaacgatgtgctcaacacttccatctctcttatcatcaaacacgatcgtcagattcggattcagatacgcagtctcatgcagacggctcttaacctcttccgctttgaacttcgtcttctcaaagatcgtatcatccggcagaaaatttaccgttgttcccgtctttctcgtctttccgatcttaggaagaagtccatcttccaattcgatcaccgggattcctctctcataccggtcatgatgaacaaatccatccctgctgatcttcacatccatataagtagaaagagcatttacaacagaggaacctactccgtgaagtccaccacttgtcttatatgcagaatcatcaaacttaccacctgcatggagtgtcgtataaaccagacgagccgcagatacacccttctgatgcatatcaaccggaactccacgaccgttatctgaaacggttgcagatccgtctttttccaatgtcacctggatctcactgcagaatcctgccaggtgctcatctactgcattgtccacgatctcatagatcagatgattcagtccttttgtagaaacacttcctatgtacattcccgggcgtttccgtactgcctcaagaccttccaataccgcgatactccctgcatcgtatgtattatttcccgccattactctttctccttctttctcgaactcaaactgttctatacagtcaatcaacaaatatgatatcatttaaccatctgattttcaacttctttttcgctcatatgttctgtcaaccttcttctgacaagagaggactgtaactgtccgacaaccgtttattctgtaactacccgctttaatgtccgttccagtacctccattgcattcttcatctcttccaccgtatttgtctgcgcccctgcttcgatcaacagagactttggcagcagatgaagattataacggtaagctttcagataaatatgccttgcaaatcccgggtaatactgttccgatgcaatctgcatctgcaaggagaacgccagattatcctggatatatggattatacagataggcaatatcgccatttgtccgtgtcctgctcaatccattaaaatacatgatcttcgcagtcggttttccattcacttccgttaccagatgtgtgtcctcatttacaccgtctctgtgaagatcaatcgcaacttcaatcgtcggattcgcttccagaaccggccgtactgcactttctgcattctcatatgccctgctgcggtcaagtttcccattaataatatcatacactccgctgtcatgaagtgtctcaattccatccgcatttaataactgcgtcagatattccccaatcccaacgatgcttgtagatggatcacccggtatggagtcggcaaattcttcctgtgaatgcgtatgaaagatcaaaattttcggcccacctgtactttgatctatcttcatactccggtttaaaagatcatccacattaagttgctccggtccaatcattgtagaactgtctattgtataaagattgcttgtcagatattcaaaatcacgcagccgctcaatagaaagatccattcccggaaccggctgttctacagcactttcctgtgtttccggctctgctccgaccagttttccctcttcatctaccgcatgttcatcatttgcctgacactgaagaatccatgcaatcgtctcctcatcttccaatacttcctccggttcttcctttccccttttttctgtctgatcttccagatatcctgccaacggcatccacacatgaagtggaagcctgaagatctcttccctttctgattcctgttctttctgataagaaaaaagcggaaggtacaatttctgcgcataaatctgactttcttctaataaaaatgttctcccctcttccaatgaccggcccatcccaattcctaacggaatacctgacagaaccagaatcaccccataccatttcatacgtcggattgtttttttcttatacacacgcattgcagagtccttccgctcatttctatcattctattcactttctcctgcatttatatcagaaaaaagaagattcaaggacgctgctatcgtatgactgatctgatgaaccatttcatccacatcttttggtgtcacaaacattccatttaaatgtggggagatcaattcttttacaaactcatatttttccgccgcactataagagcgcaaaatctctcctgtactccttaatgcctgcgactgctccagtgcagtgatgaaattttccatcgtatcattgacgatcgttgccgcatcaacaaccgtaggcactccgattccaatcacaggaacccccagagattcttccgtcattgcattcctgtaatttccaacaccggaacccggatgaattcctgtatcggcaatctgaatcgtccggttcaatcgtctgctgtttcgcgcagcaagtgcatccactgcaaggatcagatccggcttcgtctcatggacaattccacgaacaatctccgccgtttccatccccgtctgtcccatcacgccgggaacaattgcactaagaacaatcaattgctccgtacgcatcgcatattttccgtattcttttactatatgccggtttacctccagatgatctgcaacataagggccaagcgcatccggtgtcaccgctctgttaccgagcccgacaaaaagaatctttaattcttttccatcttcacaggaaattttatgaaaaatcaattcccggatgcaatcacagatccgttcctgcaataccctgctattttcttccacctccaatgccagatccggagattccagtgtcagataaatacctgtcggttttcccatgatcttggctccattctccgtctcgatcaccacacgggtcagccggatctcattctcctcgtcatactcttcctccagaacaactccctgcacttctacattgtcagatgcaaaacgttccttctcctcaagtgcaagatccgtacgcacactgtaatttttcatcatagcctcccttttctccgtgtcaatcagcggagtgattgacacgggagtgaacagtaaccataatttgtcttattacagcctatttttagcatttttttgtaaaatatgtattgacagaacacgtttgttggactagaataaatgagtatgtttcgatagaacgtccgtgtccgagtctattgaacacatgaatcacatttgaaaatcatatgatagaatattttggaggtgcacacattggctaatattaaatctgcaaagaaaagaattttagtaacagagacaaaagctgctagaaacaaagcaatcaaatctaaggttaaaacagctgtaaagaaagtagagacagctgtagctgagaagaatgtagaggctgctaaggctgctcttcacacagcaatcgttgagatttccaaagctggaagcaagggtgtttatcacaagaaaacagtttccagaaagatcgctcgtctttccaaagctgttgactctatcgcttaattataaatagagaatagaattttcaggcgcatctgctaccgtcatggcagatgcgccttttgttatatattaggaaagtactttcctaatatataacaaacgctccgctcaggatgcgcactgcggcgtacaatgtagatgtcgcaagcgaccgccgcaggcgcaagaatgtgccaaggcacattctttataatacgttcagagccaggcagttctaaggatacagattcgagccatgctcgcatgagcgagattctgtattcttagaactatgtggcggatacgccacatcgataaaatgcgtagcattttaaagatgcctggctgctgcacgacacctcagtcaaaaagaccggcacttccaagtcttaacctgaaagtaccggtcttctattatcttattctataatctcagacaactgattagttgttgatcagtttgtcctcatcactccagctgtaaagctttctgatctcagctccaaccttctctgactggtgctcagcagcaagttttctcatagccttgaagtgaacctgtccacctgcttcagacatatcaagcaggaagtcttttgcaaatgttccatcctggatatcagaaagaactttcttcatagctttctttgtatcttctgtaacgatcttaggtcctgtgatgtaatcaccatactctgctgtgttagagatagagtatctcattccttcgaatcctgactggtaaatcaggtcaacgatcagcttcatctcatggatacactcaaagtatgcatttctcggatcatatccagcctcaacaagagtctcgaatccagcctgcataagtgcacatacaccaccacaaagtacagcctgctctccgaagaggtctgtctctgtctctgttctgaatgttgtctcaagaactccggctcttgctccaccgattccaagaccataagcaagtgctctgtcaagagcttttcctgtgtaatcctgctctacagctaccagacaaggtgttccttttccagcctgatactcgcttcttactgtatgtcccggtgccttaggtgcgatcattgtaacatcaacattctttggtggtacgattgttccgaagtgaatgttgaatccatgagcgaacataagcatgttaccttcttcaaggtttggctcgatgtcttctttgtaaagtttagcctgtttctcatcgttgatcagaatcatgatgatgtcagcctgctttgcagcttcagctgctgtatatactttgaatccctgctcttctgctttcttccaggaacggcttccctcgtacagaccgatgataacatcacatcctgactcttttaagttcagcgcatgtgcatgtccctggcttccgtatccaatgatagcgatcttctgtccttcgagaagagaaaggttacaatcttcctgataataaatttttgctgccattttgcattcctcctaaatgaatttaaaatatagagtagaatgctcccgatctcttcgggggtatcctatatagtgaaaggtcttgtcctttactagctttatctgttctacaagttctccctgcggttctccgatcctgaccggatcagaaaaatgcaacatccttgctgcctcttgcaagtcctgtaattccggttcttgcaagttcaagtatctcgtaatccttcagaagattcaagaaagcttctagcttattctgtgtacctgtcaattcaatgatcagacaatcttcttccacatctacgatctttgctctgaaaatatccgcaaccgagataatctcaccacgctgtgcggcattcgcacgaagcttcaccatgatcagctctctgcagactgactcttccgctttcaaagccttgatatccacaacatcctccagcttacggagctgtttctcaatctgtgataggatctgctcatcaccggatgaaacaattgtaatccttgtaaatctaggatctgctgtcatacctgccgtaatactgtcaatgctgtatccacgacggctgaagagtcctgaaattctgctcaaaacacctgaattgttatctacgagcagtgaaaatacctgacttctcatatgtatcctctctttctcacttcaggaagcgaaaatattatgactgactaagatgactggctcgctccttccatgatttgtataaaacagagtgcgttctgttttttacttacttaatattaacaactagaaccggctttgtcaaccctcttttttgagatttttcatcacagaccaaattcctctgccagttcattcaaatacatccagcgctcttccttctcttcgagctgctctcttaccttctcctgctcttccatcagctcacgcagtttcactgaattcgttgcatttgcggcaatctgacggtcgagagaggctatcttttcttccagctttgcgatctcctcatcgatcgtctcatactctcgctgctccttgaacgaaaacttcaccttctgacgctgtccatccttccagttctttcccgtcttcttctcctgcgtctcctcttctgtggacttctctgccggtttcatttcagactttcctgtgataactttgctttcctctccgaatctgcgtttcttcgcctctacataatccgtgtatcctccctcaaactgtcggatcccgccgtttccgtccagttcaaagatacggtcaactacattgtccagaaaatatctgtcatgtgatacggtgatcacgattcctgtaaatgaattcagatagtcctcaaggatcgtaagtgtcgggatatccagattatttccggcctcgtcaaacaacagaacattcgcattctccgcaagaacaccaagaagataaagccttctcttctcccctccggaaagcttaccaatcggtgcatactgcatatccggtgtaaataagaaccgctccagaagctggcttgcactgatctgtccgtcctttgtcgtcacatactccgcaatatccttcacataatcgatcacacgctgggaatcatccatatgctgttcttcctgtgcgaaatatccgatcttgatcgtctcaccgatctcaatctctcctgcatccggcttgagtacacctgcgatcatcttaagaatcgtagattttccacagccgttcggtccgataattccaagccgctgattgcgaagcacaatataactgaaatcatccagaatcttcttctccccaaaacgcttgctgacatgatgaagttcgatcgtcttcttgcccattcttgtctctacagaatcaagctccaccgtctgatccgtcacaggtgcttttcctgctttcaacgcttccagacgttccagtcttgccttctgctttgtcgttctcgcacggcatccacgcttcgcccattccagttccatccgaaggatactctgacgctttctctgacttgcaagctccatctcttccctctgcgccttcaattcaaggaatccggaataatccgcatcatatccatacatctttccatggctcagctccaggatacggttcgtcacacgatcaaggaaatagcggtcatgtgttaccataagaacagttccacggtaagatctcagataatcttccagccaggaaatcatctcctgatccagatgattcgtcggctcgtccagaagaagtacgtcaaagtctcctgcaagtatcttcgcaagaaccacacgtctcttctgtcccccggataaagtgtcaatcttctgatcccactgcgtgatcccaagttccgtcaaattactttccacttgccagctctccgcatctgcatcctgaagtgcgtaggaacggatatccatcccctccggaaatgtcggattctgcggaacaaaagcaatcttcagaccattctgacgaacaacctgcccctcatccggcacttcctctcccgcaaccaccttcaaaaaagttgactttccggttccgttaatcccaacaatcccgatcttatccccctgctgaacaccaaacgatgcatcatcaaaaatcactttctccccatatattttagaaatatgttctatattaattaagttcattcttttccctgctttctgtttttctgcatttttatcaatcacatcgcccttccagtataacagatatttcagacactgaaaatcttaaaaatttttaaattcatatttgaaagggttgagaaaacacggaaaacgttataacatagtgagatacatgcaacgacatggtttcaaatggaaagtgaggtaaatgatatgagcccgaagaatgatttctcagacattttcgatgacgattttgaagttacatatgaagaagatccagaaatcaattttcatacttctgaagatacaaaacaaagaaacagacctgattctaacacggagacaatcgttatgaacgcagacgattaccgagataactttaacgattccgatgacagccagttcgaagaagtacttcctgaatatgacgatgattatgaagatgatgatgcagattatgaggatgattattatgaggacgattataacacttccaacagaagatcaaatcgcaacaatccttataatgattcatataataatccatataatgatcgtgactacgacagacgctcctccggcaggaaacgttccggtggcggagtaaaacttgccgcaccgatcaaaaaaggcggaaaggcattatcaaggctcacaagcacattgcttcagcagctttctattgtgttaattctggccacaacagcatttgtactctacaacttttaccgtgcaagcacaccgtacggagatatccaggaggcaatccagacacagaagatttcccagactctggccgcttacttatgtgtagctgccctcttcctgttcttcgaattcatctcccttctctggtcaatgacacgcgtccgcgtacgtgacggagtctccagctggagagaagataccggaagaggcctgtggtcttttatccttgtattcgcggtttcctatgctgcgttcctcttcagcccgttgctccctgattcaccggaagtgatctacggagtgaaaggagctcttgatgtatacggttccctccacaatgtattgtttggactgtgtgcagccggagtcatctcctgcctgatcaggaaatacaaaagttccaattagaacacaatattccctttacaaaaagtgcacccggcaacgaaatcaattacgaaatcattgccggatgcacttttaaaatttatgggccagtctcaaaaaataggatgcattaatccaaaatgatcagtgccataaacacaagatctgtatcccctgtattcgtcagtccgtgtcccattccatccggtgtaaatgtcatatctcctgcctttaccgggcggatacgtccattgtcatcataatttccttccccgcgaaggatataatatgtctcactctcgttgtgatgctcatgatatccaagagaacatcccggctccagtgtaacttctgcatacatcttgcactttccgttcagttccttatcttccagaatgtgcttgataataacgtgtccctttccaccagccatgttttcttttctctcaactcttaattcactcatcttcaattcctcctaaaacatttttattgtaaagcttatttgctgttactgttcactacaatacttcttttatctgacatttatttcatatagatcaattcatacgctcttgttccaagaccgatcttctctgcatgtgccagacaagtcttgtactctgaattcggtgttgtattctcaaaatgatcatgatgatcgcagaaattctcttcttccatacgatctgcaagctggctgtgcggcaacggtgtcgcgctaagacagacatctgcacatgcctgatccagtgccagcggatcaaaagaggcaaacataccgatattcggaagaatcggtgcatcattctccggatggcagtcacagttcggtgatacatcaacgatcagtgaaatatggaagttcggtcttccatccacaaccgcctttgtatactctgccatcttgcagttcaatacctttgtcgccgcactgtccataaatgaaatggcatcaaagttacatgccccaatacatcttccacaaccaacacaatgttcaagatcaatagacatctttcttgcatcagcatcataaatcagaccatcattcgcacactctctcagacagctcttacatcctctgcaggcttcctgatcgatcgtcggcttaccaacagaatgctgatccttcttaccggctctggaaccacatcccattccgatattcttgatcgtaccaccgaaacctgtcgtctcatgccctttaaaatgcgtcagactaataaatacatccgcatccatcacggcacgtccgatcttcgctttctctatgtactctcctccctgtaccggaacttcaatatcatccgttcccttcaggccatctccgataatcaccggacatccgacactcaacggtgtaaatccattctcccatgcacagtaaagatgctccagtgcgttctttctactacccggatatagtgtattacaatctgtaagaaatggctttcccccaagctccttcacgacatcaacaaccgccttggcataattcggacgaagataactgatattccccatctctccaaaatgcatcttgatcgccacaaatttattttccatatcaatctcactgattcctgctttcttcatcagacgtttcagcttcgttggaagaccttcgccaagcttcgcccggaaatcagtataatacacccttgctttttccatgatgtaaacctcctgttgtaaattctgacagcttaaccctgcattcttatcatacactataaatctgactcttccaatcatttttagaaaaataataaagtggacatccccttgacgatacggtatactcaaattatcaattccgaactcagcaaccattcgatcactctgaaggagatgtaatgatacaatgaatcatctggctgttacctcaatactcactgttgtagcacatatcatctggtttgcttctatgacagaacgaaaatatccgatcaaaaaaacggttctactctatggactttacgctatattcttcactttatgggccatacttgcatattccctgcttggcaaagactctccgtatgtgattccattttcatttgtcggaaccatcctgccagcaattctacttttcctatatacttcatctgatagtttcagcaaaaaaatatttttgatcgttacttatgcaaatttgttctgcatcatcatttgtctttctattttgatctgtgatggattatttccgaatttatccattgtaaaacagatatatatacgaagcttggtacgaatactgttgaatgttcctgcagtcctgctgtatctgtggtttgcgcgtccttatatgcgtacagtacccggagacagaaaacggacctggtactctatttccctcgtgtcctttctgtttttaaccgtgtttgcaacgcttatcaacttcctcatgcatgatggtcataccgccaaacagatgatcctgtttatcacaacaatgatgatttattgtgcagtactgtggattgtatttggcacgatccaacacatgaatgccgaagtgaagatggaactgatcactcaaaatgtacaatacctgcaaggacagcttgccatggccaaagaacatgcatcaaccgccaaagccatgcgtcatgattttcgacatcacatgcaaaatattgacctgcttctgaaacaacagaagccacaagaagcgatacattatatagaagaatttatccaaagcctggatgcggcaagtcagattgatttttgccctcatgttacagccaacgccattttaaacaacttttataatcaagcacagaaagaaggaattccgatctctataactgccgacacaccggagtatataacaattgcagatatggattttgttgcgatcctttcaaatcttctggaaaatgcagtaaacggatgtatcgaatgcggttcccgggatgagatcacagtaaatctccgtatgaaaaaggagaaacttgtgatcgtgtgcagtaacccttgtaaaacggaccttgtgatcgaaaatgatatcatcaagtcaaaaggaactgggatagaaagcatcctgatggctattgataaatacgatggaaatatccgttatcagatggaagacggtattctgacagcatgcgtcatccttaactgctgatctttgcagaaaatcagatcactatttcacgcagaaaaaacacggtttcacgaaagaaacgcgttttttctgcatttttcttttatacttacacataataaaacattctttggatcgttactcattgtgacccaaatttatgaagaaaggatctgatttaaatgatgaactcaaatgtacaggctgctatgccaaaattcgccggattatcccatgtatgtattttcgtggatgatatgatggaggcggttgactattaccagaaactgttgggcgttgtaccggatcattacctgtcccactggagaaacgaaggattctttaaagccggcggatttgtcaaagaagctgccgacggcgatgtctctatcgcttttgtaaatgtaccgggcacaaaactgacactggaactcatgcagtaccattcaccggaaggacgaaaagaacctgtcttcttcgctgccaacgatgtcagtggcgcacgtcatgtagcactgaaaatcacgaacatcgacgaagcatttttacatattaaatccatgccggacacacggctgatcaatgagactgacgattatcaagtattccagatcagcgagacctatccagatgaggttcatttcttcgatcaggatatgaaagaaatggatgaaaggaaacagcagacagctaaaatccttagtgaagtgcggtatttctactttattgacaaatacggtctccaatgggagttcgagcagggacatactgatatcggtgattaagtgaaaaatggaacaggagtcggtttgcgttacccgttgtcatacgcagcgacttctgttttttgtttatcttattattttttctttaccaggcaacgctttttatagaatgcaatgccatagcaatgaatatgatcactgtcatactcgtcctcaaaatcccttgcatacattctttcatcaatttgccgcaatgctttctcacactcggattccaattcatctaccgaccttgcacgtttagcctcgaaaatagccacgtgaccattgatggtatcacagacaacaacatcacttctgccttctccatgttctttatttgaatccacctgatatccggctcctgcaaaaataccacttaagaatgcatggtaaaagtcttctccgtaatcatggtaacttatagttcgccttaataacgcactcacttcttttgtgattttatcgcaatcttcattccatacagatgaaaacaattccgttctattccattttttagaactatcctcaaaccacttagaaacttctgtctcgaaaatttgcttgatttccaaattcggaattttcagtgctaccatgttgtcttgccagtcatcatcaattttataatctctaacctgtgttaaatatcccgtcaaatacattaagctccacagattttcctcagaagaatgcaaatagtcgtaagttagattctcatccactctctgaataatatatccaccattcatcagtgtttcaagtttcttcgtaatgcttgcacccgcataatcaataaatgaacgaataattacattatcacttgtatctttccagtattcatctggttttgcattaggattcttctgcaggtcatcaacataacacatcacatcccaggggcaataaacatcgacatctccgaaatgatatccatcataccacttcttcataatatctcccttacccttaatttctgcatcttcaagaattctatcaacttcgttttgaacaaatccatagtactcatttaatcgagaagatgtaatcgtgtttgagacaaaattgtttgtacctgtgaaaatgctttcctttgcaattttcagacagccagtaataacagcaagtttaatgcactgattatcttttaatgcctgcataaatcccttcattatttcaagcatttctttataatagccattgcttgttgctctcgccataggaacgtcatactcgtcaataagaagtatgacactcttattgtaatacttgctcaaaaactctgagagaatttgaagcgaacgcattacttcgattttccccgctcgtccataccgaatgtcaccaaacttctttttttcttctgcattcagcacagggctttccatgagatattcatgcttcttaaaaagctctccaacttcataaacaagctgcatatacgcagttgaaaaatcatttccctcaaccgccttaaggctcaagctcatcacaggccactgattcatccattcctcacaaatatctctttgttttgaaatttccaaaccttcgaacaaaactttgctatctttttgaatatccagaaagcattcaagtgtactcattcccaatgtctttccaaagcgacggggacgagttattaatgtaacctgagtaccggatgacttcaggatttcaccaatcaatcctgttttatcgacatagtaaaatccatctctacgaattgtctcgaaatccgatcttcctttcggaatatttaaaaaagtcatgtcatccactcctctccgacattttaccgctgcaactgcaaagatgcatcttgtcaaaaaatatcacgcgctccaatgtattttgattctaccatcttactggataaatgacaagttgggtaaggtaaatagtaggcttgtttaatgtaaaccaaactctttcaatagttttctctgatattctttgtcaaccgccgcttttgtaatgtcttctgtacgtccaagttttgacagttcgagaattaattgattgatttctgctcttccttcttctatcccaatcttacgtccattctcaattcctcgtctttctgcggttaacattcctatattgtaatctctaatcgctctttgtcttgtctcgtattctaacctcttcttttcatctgcgcttaatttatcaaacacgtcatatgcttcttccaattcagaatttttctttgccattttttcaaaatcctttctggtttttcctccaagaaagcgcatccactgcaacaggcttgtctcatttttctcttccggcggaagttttgacaattctaagatatgcatttccataagatctgtatactcttttcctgtcttcgtatcacaaaatgcaattcttcgatagcactctttatcatccagaaaatgattatatgcagtttcacccggacatctaagattccatacttatcatctttcgattcttttctgagaattgtaggcataagttccgtattctccacctcactgggcggaacatttaatagtgctgcaataatgttcttacggatgttatcattctgcattaattccttgaaacagaaatctaccgttggaagcatgataaaatcttcctgcttctctttcgatgttttacaatgtgatgatactttccttgttgatacacttttcttgttttctttcataaaattctcctctcttctgtgggatgaatgattgcctgaagaagagaattctaaagttatatttatcttaacacaagatagttttctatggaagtaactatcccttaaaatcagatatttgaaaaaacaaacttcctcaatcacataatcttcaaacaatattcatcttttgggtttgtcatcggattatctgcccggaattctgagcttattgaataattaccgatttggttcatagatctttttgcagttcatcagaatgataactgcgtggtattagattaacatgagaattctattattgcaagctgaattttttatgctctgatatttttttgcaatctcaaaacagctgctctatatagcatatttctctgcttacagtagattgttttcattctttctttttctgccttatggaatatcattttgcctacctctttactcatgcagttccagcggcagtccgtccgggtcatggaagaaagtcatcttctttccggtataatcgtcaatccgaatcggctcacattcaataccgacttctgccaactcattcaccgtttgctccacgctatcaacgcagaacgcaagatgacgcagaccacaggcctccggccggtttacacgcttcggcgggttttcctcagcgaaaatctccagttccgtgtgttcattaacacgcagatccagcttccagtccttgcgctccgggcgatagttttctctgatgacagcgaaacccagcttgtttacataaaaatccttagctacttcgtagtcagatacaatgattgcaacatgatgtatttttgataaattcatttttctcacgctccatttcttttatttccatcacaaactatatggcgaccttcaaaaaagaccgtgttgttaacttccagtatttttacgactcgttttaaagatataccgatttattaatcaaatgataactcctccgtgtcctgtatagccttctccacatagtcttcagcttctacaagaaggccctttgtttctaaaaatttttccatatgcactcagcacaactttttgtgttttttgacactgcatgatccaatcggtatatcttatccagttgtcttatcatttcgattttctcaagttccctaattgctgccgaaacagttggaagttaacaaatatcctcatcaaatgcctgccgaactgcgtcctcatcatacattgccacaatctgtttctctttcagctttttcttaagttcctttttcgataatcccgtcagtctcctaacatcatcaaacgtcagataactcttagtctctccaaagctcatcattgcttcatctttcagatcaaccgggtactcttcctctggatgatcctccagatgaaaggcaatataaaatctctgtgtactcttcagataaccgcatagcctctggtaaatataagtgatagatcgtgcataatcttcatccggattatattgaagtgcatagtaattaatctcaccttcgtcatccgtcacaatatttccccccacaatttcatctttcaatttgaaatatgccagattaatcgactcttcatctgtcagatctgcatctgatcccacctgcatgattcctactgttgtatgtcttcccgaccgtactttaattctctccagttttcttttgaatttgcctctgttataattttcaaaaatcatgattgaaaaaagcaaaatccagatccggttatcattttccgtaatctgaataatatctttatacttcttataaaaataattaaatcgattactgatatatttgtccagtcttgattcacccacgacctttttctgtgtatacactttatcaagaaaaacggtcataaatttgtataccacagcaattacaacgagccagaattcattcacaagttcagaagccggtataaatactttttccggttcacagagaaaatacttcatcagaaaacaggctgctccgattcccaatactgcatttaaaagttcatatcgcacattatacaattctcttctgttcagtaaaatacaaataagaaatgcgcgatacacataatatgctaccacgtaaacaattaagaattttctgccaaaggctaattccttcacgtgatagcaaaacattgacagaaggatcaaaatgatattcggaatcaagatattcattaaaatatttgttgacattcctttgtcctgatccgcgcgaaatgtaaataccgcatacggtcttccactatttgtgacactgtgtaatacacttccacaccaggaaatagtatgtacggtaatggcagcaaggataagcaggaataacaggaaaatccagtctttgggattgtatgaaaatattgaggttaaaatagtgtttatcatttgtgtatgcctttttccgtaaagtttataagaactttaccatattaatatatataatttctaagattcaaaaatcattttatttgaaagcaaaagctatcatatctaatatatctttcattggaccttttgacaattttctacatctccttcctccacattgataaacaatattcctcaaaaaatccctctttcttttccacagatatcgctctatgcaatgcctggcctgattttgtaaaaagtacattccctactcttaccgtttttgtttctttctccatctcatactctgaatcaaaataatgaacctttattggattactctcactttcgataacatatcctgatgctatcgggcctaaatctgcctctattaaacctaatgcaatcaaacttataattttatcgaatgttattccccactttttatattcatctaatctgtggcaccaaataaccggctcatattcatcatctacttttactgccaaagaacacaatgtggtaaatgtctccgcatcttcccgatccatttgtgctaatgtatataataatttttttggtatactgttattatcattacactcttcagcaagaatctttccccatatactttgaaatacttcatccgaaataagtcgtgcctgatccataaataaaacaatccaatcgtcatcgactttttgtggattagctccttcccttaattcattaattgcaaatccaactacatctttctgattacaatactcttttatcgtcttctttgcctgactaatcaatgcagccttaagcaatgagtcataatcactatttttaatatcctcaatatatgtagcaattgcaattctttcaggtgtctctctattcactccccatcctacagctgttcctaatttatccaacaaattattgacaacatctgcagcaccatcaatatctaatatactatatttatttatatcactcattttttctgtccttctttctatttttcctctattttagttctctcggtttcatttttctgttttattttctttctaacagtttttattatctgaattataataattcctaaaataacaatctatgaaaaatattccaattccttcagccctgatttcatcggcatttgaagaaattcttttctttttttacaaaaaagtacttgacaaaacctcctgaaagtgaggtcgcttcgcgacctattaattaaggaattgttcgtctcgccacgaaccttaattacactttaggaggtatgtcatatgaatcgaattgacatctgcaaaaatatcatccaatccattaaggagtatatcacaaccccagaaaaactggaacctcatcgtgcgaaaaatcattttattcgcaaacgaaagctttctctttttcaagtaattatgtatctgctttacacttcaaaggcctccatgtttcaaaatctttcccgtattcgggaagatcttggaagccttgatttccctgacatttcaaaacaggctctgtcaaaggctcgccaatttattaaccctgacttatttaaagagctctactatttatcagttgatttattctataagcagttcccatctcgtaaactttggaatggatatcatttatttgccattgatggttctaaaatagaattgcctaattcgaaatcgaatttcgagttctttggtgaaatgtttggatatcctgatccaagccgccgttttactatgggactttcgttactgtgtcgagcatcagcacctttgtcttatgcgcttaaaacataattataacattgctaagaaatgctctggagacataatcacggttcttcccggcaacgaaaaagacgggactgaggatatcaggataagagtcatcgaagttattctcagtgatggaacgaaagagtatcttgccaccaatctttttgattcacatatttctcaacagatgttccgcgaactttacttctatcgctggccagtcgaaacaaaatataaggaattgaaaagccgccttgctattgaagaattttccggtgcaacgaccacttcagtgcttcaagaattttatatcaacgtacttctttcaaacctgtcatctcttattaaaaatcaagttgatgaagaaattcagattaccgctaaaaatacaaataaatatcgataccaagcaaaccgagcatttattatcggacgtgtcaaaacaatagttcccaaaatcctgtctaatcttttcgatttatctgtacttgatatactatataaggaatctctcagatgcagatctcagattatgcctgaaagaacattccgacgaaagaagaataaagcaataggcagaacacattttaacaataaaaaagttgcattctaatatcaatagctgttaatagggctttttctgtgaagctctattaaagtgcgtcttcttttcaaatctaccttcctcttttctcaatttcgcaccgttagtcattaacctgagcaggcacttgtcttaagttgacattaggttgatcacattggtgcctgacaccaatgtggtatcgttatcaggctttacccaaataaagcttccgttttcttagtaatttatagtctgtccgaaaacttacgagaccgtttcaattctaatgctcataatgaatttttttcaagtaatttctgcacgttttggataaatacctctgtatgtgcaatagaaaagactttattgctctccaaaagttcatttttcaattcttccaattttttcaacaatatttgaaaaccttgttgtgtatttttcttatcaatctcagctataacatgccaattttcccatattctttcaaaataacctgggaaacgacacttctcagcgttattacacctttcgaatgctttcaccgtagcagacgccatctcatcatcaaatgcattaaaacgattattctggcaaatgtacaatgtttccaatgggtcttttcccattccatctatgtatatttttctgtttctacaaaacaataaggtatttccttcacgaaattcgtcaataagcaaatacgttttccattcctctttgtcaaataaactctcgttttcttttgaaatgcaagtataaatctgctgtccttctggctgctcctcttttaattgattgatgcgtcccgctattccttctcgtatttttccccactcaatcttatttggaaatttgaacttatattgccttgcccacacactgttctgtatcaaattgacgtactcgtccaaggtaagttttccactatacgccaattcaataagttcaggaaatccattgtttacatcttcctcatctaaatccataattctatttacccgaagtaaatccgtaggtttttttgctttttcccgttctattctttcttttatttcatactgcaactgctcttcatcccaatttccatgtaataaccattcttcaatagctttcaacatataattacgattaaaatcagctttaactccagctttatatgcaatcacataacgtgtaaacgcatacaaccacctttcaacatctgagaatccattcttttccaatataatataaattcggtaaaaatcagtaattgcgcacttaagacttctaatattatgtaattgcacattctctcctgttgaccttacacccatattgggtgcaaataattctaatagttctcgttcatgtttctctataaagccttgatactctttatcctgatatttcaattccctgatcacattgtggacaataccctcataatcaggtttatattgaaccgttctctgcacaatcttctctttaatttctgcatatgtaagctgaatcaactcatcctttgctttatcctcttcatttcgctctttatctgactgcatcttatctggattacatacaataatcgtataaaacttctgattttcacaataatcatttatacatcccaatacatctatgcgatccatctggcaacgttcaagatcatcaaaaactaagattacaggtttcttatttatgatattttttactcgcataaaatttgacaatcctacagatgcaagaagtttcatctcatcgtttccttccatctttgcaattgaagattgaatattttttagaaatctcgttgttttcttaagaacagtaggaaaattctcataatacgcttccatccaactttctttcacaagcgaatgaatattctctaccgaggacactccaaataaagagacccgaataataactttttcttctcttccgttctgaccatcaaaagttgctttcaattcatgatcaatcaaatatgtcttcccacagccccattcgccagtaaacatcaatgcacctaccggctccggctctgtacagtaatacactaattcccgtaatgaactctttttgtcgatttgtaattcctccatacataaaccttccttttttgccatctgatattttctcattttctttttgtaattaaagcgtttgcattgcataattgccgctacagtaatcacaataattgcaaataaaaggatacaaaatgacttaggaactgagtaatatgaactacatgtcccataagaaataaaaagaattgtaataggaacaataaccgcatagacaatattgtatgcagattctaatatatttttctttttttctaaaaccgcttcttcataactccatcccgaccgagagactaactcctctttacatacataaattttaacttgcatgacaatagcaataactaagactactgcaatagctacaggaaaaaggtatgctaatccagtgatatttcctaatgacataaagaaaaatagtactggaaaatatccaccggaaagtacttcccaaaaacattcatgcatatcgcctttctttagtaactctttttctttcgcattgtgtacctttttcttttccctgtgatagtaatataatattataagtagagctgctccaactatcatccagatttcataagatttaaaaatttccatgtccacttcacacaatatttcactcaaaactgtgataattgccacctattcctttcctatattgttattgtcaaattctaaagtattgaatttgtgagctttaaattatcagctcacagaattctgctcggatcgttgttccccactgtgggcaacttcataagctcaatatcgcaacgacatctgagatttttcaacatctacatatagacctttacttctaaagaaatgtttcaatccaatagcggcaatgtcactaccattttttgcaccgaccaaaaccctttttaatgaattcacgtcttgtattttttcttttacatatggaattaaaactccattcttcaaccgaaaatacactggaactctatcttctggcttacaaataccgccatcatgaattctagatattacaaatctatactcattttccccttcaaaacatggaagcttaaaaaacatgttatatccggtaataaccatagccatcaaagaaacatatcaaagctctattaaagtgcgtcttcttttcaaatctaccttcctcttttctcaatttcgcaccgttagtcattaacctaagcaggcacttgtcttaagttgacattaggttgaccacattggtatcaggcaccttatatagtttcttatcaattataaatatctgtccgtatctcttgcaccatacattaaacgtcgtacttccatcacatcatcaatcactacataataaacaacgtaattgcgtacataaatccgatagtaagggtagtcacgtttttttgcggatgggtatggttcaaaggcaacaggattgttcagcctttccagtatggcagcttctacatcatcaaccagacgaattgctgcgtcctcgttctttaaaacattcgtaatgtaattcgctgtgctaatcaaatcctgttcaaagagtggtaaataccgcagcttataggatttattttccatgtatagctctccttacattgctgaatactgtttcatgtgaaagacgttcctctgtcatagctgcctgtctgtcagcttcatcaagtttcatttctatgctgtctgtcagacttgcatattcttccaaacttaaaacaaccatagcaccataaccattctttgtcagatacactggttttcctccgtttacaatagcttcaatttctggaaatttatttctaaggtctgaaacaggtcgaatttgtatcatgttcaatcgctcctttcatatcatttattctatcctaattttatcagaatattatcacagaagcaatatttacttattttttcagaacgtttttctatgtcacagtatattatatttatgatatgataatagagaaatattttagaaaatcagaaagatgaattctaaatcaaaagatacattcacaggaggtgaaataattgaatcagatgatgtttggattattaattccattgattggaacggtactgggttccggtatggtattttttttgaaaaaggatttgggtgtattgacacagaaagcgttgcttggatttgcttccggtgtaatgattgcggctggagtctggtcactaattatgccgtcgattgagatggccgaggaacaggggacaattccatggcttccggctgcggttggatttttgcttggaattgctttcttacttgcattagatacgttgattccgcatttacatgtaaatgatgagaaaccagagggaccggcatcgaacttaaagaagagcaccatgctggtgcttgcggttacgcttcacaatattccggaaggaatggcggtcggcgttgtattcgccggtgcgatgatggaaaattctaccgtatcgatggcaggagcgattgcacttgcaattggaattgccattcaaaatttcccggaaggcgcaatcatttcgatgccattaaaatcacagggaatgtcaaaatcaaaagcctttttgtatggcgggatgtctggtgttgtggaaccgatttcggctgtgattacgattctgttagctgatttagtggtgcctgttctgccgtacctgttatcgtttgcggcgggggcaatgatttatgtggttgtggaagaattgattccggaatcccaggctggcgaacattccaatattggaacaattggtgttgcaatcggatttgtaattatgatgattttagatgtggcactaggataaagatgtataaaaaaggaaaaagttgcgaatgaaacttacaatattaggaacgggaaatgcaaccgtaacagaatgctacaatacatgctttgctttgagtgaggaaggaaaacatttcctcgtagattgtggcggtggaaaccgtattttaaaggtattaaaagagacaaaaatctcgttggaagatgtgcatgatatcttcattacacatgagcatgcagatcatattcttggaattgtgtggatgattcgtttgatcggaaccaagatgaatcagggaaactatgaaggtaatctgagaatctactgtcattcggatttggtcaatacaattcagacactttcgaaactgacaacacagaaaaaagtgtgcaaacatttcgataaaagaattttattcattccattggagcacggcgatcagcatacaattcttgggaaaaaagtgactttcttcgatattatgtcaacaaaagcaaaacagtatggattcacgatgaatatcgatggaaagaaatttacatgtgttggcgatgaaccatataacgaagcggattatgaatttgtgaaaggcagcgattggctgatgcacgaggcgttctgcctatttggcgaggcggataagtttaagccgtatgagaaacatcacagcacagtgaaggaagcgtgccagcttgcggagcagcttcagattccaaatcttgtactttatcataccgaggagacacatttgaaggagcgaaaagaattatatactgcagagggtgtgcagtattatcatggaaatctgtatgtgccggatgatttggaagtatttgaggtgtaagtgcacaatgccagttagcttctctagcttaacacctttttcttccaagcctgctatcccttataatatcagtaattctcattttatactattttttaggctggcacttatttaacatctttgtaacatcttttatatatctttttttattttcctattgacatgtaacaaaaaaatgtgcggtcaccttgttgtccatcaaaacaacaaggtgacccttagtttatcaagggaattggttccccacgaatcaattattcccatactaaggaggcacacatttattatgaacgattatccatcaaatgtaaaacaaaaattgaactctatcatcgctgatatgtcggagcatcactggctcttctcaaacaatcctggacacaatttcatgcgtcagcatcaaggcaaactctctttctacgataccatgcgtcttattatcggcatgggaaaaggaactaccaatgatgaaattattgaggattacaacaagcctcgtctcatcgactataaaggatacaaccatatgcacttaaatgggtttgttgatgtaatcaacaaagcttttcttgatattgtaattcagccaggacagaagcctgatgaaaggcaagcctttcacatgatgctcgaccattttagtccggacaatccgcagaaatatattgtaaccgctgatcgtggttatgaatcttacgatctgttattccactgtgaactcaagaatctaaattatgtttttcgtgtaaaagctccatcgtcttctaaaagtctgctttcctattacgctactgaacttcctgacgaccttgaagaattcgatgttacgatgaaacgttatttcactgacaaagctacaaaggctatgaaagatcagtcggaggtgtaccgatatattaatccgagtaaaaacacacctcatttttatgagcttcttgacagagataagagacatctttatttcatgcagtttcgtgtcgtaaaaataaaaactgcagaaaatacatatgagtatctcatcacaaatctgccccacagctttactatggacgacatcaaggaatgctatcactggcatatggggcattgaaatttctttccgttatcttaagcatgcaaatgggcttttgtacttccacagtaaaaaaaccgaattcctaaaacaggaaatctatgcaaatctgacactctataatttcggaatcttcattgctaacgaagcagctgaagaaaacaagaaaaaagaacggaagaatgataacaaatatctttacgaaatcgacatttcttctgctctgaaaacagcaagaaagttctttattcgcagggattccgataaacctattgatatcattaagttaatgttgaaatacgtccatgctgtaaaagaaaaattccgacaatttgaccggcccctccgtggaatcagtgcgattcatttcggatatcgatagccttaggctctaccactgaagattgtcatttttgacagacgaacagcatctgtcttatcagcatgcccttttttctgaatctgtattttcaatcacatttcctcttgcacatgtttcaatgcaaattcgaacaaaacctcgaacacctagcttaacggcattgccttatattcctaacacatatttagcatgcaacactttttgatataactcattatcttcattctcaaaaatagccttgcatatttcttctgctttgattatacactccttcgcctcatcatttctattaaactgtaaacaatcttctgctaatgaaatatatgttattgccatatctttactataagtacccagaacttgctttcttatatcatatgctttttgatcatatgccagcgcttgctgaaagtcatctttatccgcatagacgattgctaaattactataaaaggttgctaaatacgcttcatgattgctatattccttttcaaaacgttctttgaatttcatcatataaaacatagcatcatccgtctttttatcctgtattaatccactcgtgtaatttagcactgctgttaagaaatctctttcggtaattttcaattcacatattttattaaaatattgctttgcattttctatttttcccaaacgactctctaaaataatatgtaaattataaatttcgaacaacttatcatcattatcttgaattttttctatccttttatctattaacgctaagtaatacaaaacgtttttttcatcacatgcatgaaaatatgaatatgctaaagacaatttaattgtcaaaagatcttcttcgtcaggattctcttctgcatcacatagttcatatgcatgttttaaaacagtaatagcttctctataatcagataattcaagacatatttgacaatattgagaaattacattccatatctttttataatctacatcaataaaataatctataattttttttgcaatctgcttcttgattaaccgtttgttatattcatcattacaatgccagaattcatcatttgaaatactatctattaattcttcaaaagtcgaaatgctaattacttcttgttgaattatactttcttttatcaaaggatgcattttataaccatcttctgatttatcaatccatcctctgttaatgagcgcaaccagcttgtctttttttattccagcccactctctatattggaacggaacatataaattcggtgtcaaagcgaatttctctaatagttcctgttcttctgctgtcattttttgtaatgtatacaaatgttttaatcgatttatcaagctgtctgtttttcggtcatagcttgaatatatctcatcttcacttatcgataacccagtcgtcactatttcttttatataatcatttaatggcatttctgcataacgagctgtctttgcaacaagttcaataaaaagtatattttgctctatatattctataaaattgttaaaaatatcctcttcaatattgcaaggtgcatgataatacagttcaaaaatttttctacattcttctatagatttgttctcaatatgatatctcttaaaattctctataaatggaagtcttgatgtgataacaaaagcgatacacccctctagttcatgcatatattcatcatcctgaatctgttcatccacattatccagaaaaataatggtattcttatcctgttgtcttaagaaatcacagattaattcgattcgcttttctctttcaatattttcataaatagttaacgagttaagcaaactatccattaaactattttcatagttcacccagaccaaatgacaatagtcatcttttactagttcgaacaagagcattgcaagtgatgtctttccataaccaccttcgccatatattaaaatattattacctgattctaactcgccctttaaaatatttacttcatcatttcgaaacatacagttttttgcaccatgaggtcttttggatatatatttaggaaatgtactctgaaagtatttatcgcacagcccttgattactcaatcggtctataatctcatttccacacaccagccctatctcaagtgaatcaactttatgttcctttttccattcttcccattttatatgttcattcaaagagagttctgccggtagacacaatatccatttattcatctgataatccagatttttaactgctctattgtatgaatctgtaatttgcttccattggctgcttcttaaacctgcatcaaaatacttgcactgatatacgtctattttttcctgtcctatatttccaacaaaaacatctattccaccatcaccttgggcaagccgtacaccttgtacatttctgcttggattttcctttcgcagcaactcttccatcaaagcctcaaagcaaaatctcgcaccttctataccgccatgatatttcttaaatgtatcccaatcatatactgcactcaaacttccttttcctcctgcagagtctatatatttaatagtatcttccaaattaatttatatcatcacttttatagctttctaatttttacatctgaaaaatcaaattgactatttaaaaaattaattatcatatcagacaatccatgtaattctattaaatactctttataactctttccattgaaacagttttcaataattccataaaatggtttatcaatattttcaatagatattactcctgcattttcaagattataatgcatcatacaattacgtaattttgtcgtaaataataattcaccacgcttaagaatatcgtatattttttcattttcaacatttatatctttgttattttcacaataatttttcaaacgttcaaacgcacgtaatgtgtaataagaaacaatatattctatcctgaaaatccatatatttccatcttgaaataatggtctcagtatgtattttacaaaattcatattgcacaataaatgtaaataaaataaatttacttccttcgtttgatctttcaaaaatatcttgtttctcttaagtatcttatttgtgtttacatcacaataatagttaattgcaattgatttgtagtttctttcaatcattgggggatgtaaagaatctgctaatccttctctaatcgaagcaacaaatgatcctatgtgataacccatttgataatttttctccttgagtttagggtcaaacatactctctaccgataaaaaatctgctatttgttgtgtgttaccaattataattctttcctctgtccagtacattcctaagtttagatgaatatctgtatttttcaaaaattcaaatttgccgaaatatctttctaactttccctattttacaggcttttcagcccattcattagtgaaatgatatgtattttcccttatttttgcccttatgagataatcgtaagggaaataagggaaagttttatttagtcgttgcctgccactttatcaagtaactttgcggattcccgcttggcttttcttgtggaatgggcgtagacattcattgtggtactgacatctgagtgtcctaacagttcctgtacatctttcggagctgctccatttgccagaaggttgcttgtgtaggtgtgtcgcaactggtgaaaatgaaatccttcaaatccatccagtttctgagcaatcttcctgcaaacaattcctaacgtgcttggcagttccaaacttccatccggtcttaagcagacaaaggatatttccttataatcttctggaacattctctgttccgtccagatgatagaactcatagtaaactctgtttttgtcttttacttctctgtagtagtttttgtggtaaagttctccgtactgcattcggtttttaagttgttcctttcgggcattgcgaagaatctctgccagtgtatctccaaaatcaacaatccttaccttttttcgtttggttggtccgatgatattcttgtgccttgaaccatcatatcggatactgcgtctgatcgtaaggcactgttcttcaagatttacatcctgccatgccagaccacaggcttcaccgatacgaagtcctgcataataagctatctggattggaagtattgccggtggattgtaatcctgtagaaattcaatcagtctttcataatcctctcgtggaattggctgtatatcgccatccatgtcatcatcagaaaacaggtcaacctcatccgtctggtatttcagcttaatatactgcatcggattgaaagtgatatattgctttggtgatactgcaaaccggaatgactgctgtaatactgccgagaaagaacgaatgtaatctttgctgtaaccttttctttctgaaccatctggataagtgccaccaaaggaaagcagatcgaagaaggcttgtaaatgctcagatgttacatttttcaactttctctctgaaattggatgcttcttgatgttggtaatagcaccaaggtaattctggactgtcccattactgagagtaccggtctttaattcttcctctgcccatatatcaagtaattctccaactgtaatattttccgactttgcaatgaatttcttgctttcgtaatcgtccattgcctgacggagcagtttttccgtttcacttttgctttctgttccagcgtattctttctgaaccagattgccgcttgcatcttctacatagaagcggtagtaccatttctttcctttttttcttacagatccttttgccataatcgtgtgtctcctttcgatatcagacaatcggaactgatgaaatgcttcttgcgtgtaggcatcttatggacaagtccataagccaattcgccgctcgtcaaatctgtaaacagcctgacttgctcgtgctcattgtatcataactccggttgtcgttctataccgaatcggaatcctcatacaaaacttctgataaaagattttcaagcctttgttctgccatttccggtttcttggaatagagccttacaatatctgccatatcattaaaggcattaacggtatgggtgatctcccggagaaacataatctcgttatattcatcattcgattcaaatcccattgcctttgcaatatccgcttcatttgtgttgcccttgtaattcttgcaggcaaactggaatgattccagaaacaggttatattgctttaacatcaacagcagtaaatctttggaaaaagcatcttcctttttactaaggtcgagaggtaactgtttgagaatatcgcccattgcatcacgaatctgtaattctttcttatccgtaatatcggtttcgtattcatcggtttcccccttgagccattcaatagatacatgaagtgcttccgaaagaccttccagcaccatctttttggtattgtcaatcgaaccattctcataacgcaggattgtggaagcggtaactcccatcttctctgcaacataaggctgtgtcagatttaattccagacgacgctgttttgccctgttacctatcagcttgcgtagttctttatctttcatgctgattgcctcctttttcggtatgtatgaattatagcatgtacctcacataattgcaatatgcaatctaatgattaattttaaaatttcataacgcttgacaacgcaatataaaaccgctatactaacagcacaacaaaaattgcataatgcaatttaacgggaggtgacaagatgacggaaagaaagattgcattatccatcgaggaagcagccgactatacaggaattggcagaaacactttgagaaagctggttgaatggaagaagcttccggtattaaaagtcggaagaaaagtccttattaaaactgacattctggaaaagttcatggaagccaacgaggggcgagatctgagggataaaggaaatgtaaaagctgtcacaagaaatgtggcaacttaaaaaggcggcttcctacgaaaccgccaaaggttctatcagaccgaagccatgatatacctacacgcaagaggattataccatgtgcttctcctgatatgcaaccgggaactgttgtttatcggaaaaagaaaggatgaagacgatatggcgaaatcaacaaagacttatgaagaaagaatacgtgcattagagaaaaaggaacaggaaagcattgaagctacaaaaaagctcatagcacagcggaaggaactggaaaagagaaagaaagcggaagaaagtaaaaaacgaacccacaggctctgtcagattggaggagcggtggaatcggttcttggctgtccgattgaggaggaagatttaccaaagttgataggcttcttaaaaaggcaggaaacaaacgggaagtttttctcaaaagcgatgcagaaagaattagttacagacatggaggaagtgtaatggcggagggagtgggttttccattcccttcattgcctttgaatgaagggcgcacttatggacaaccagaggtcgtccttataagtttgccacaagtggcaaccggtctgcgcttacgcttgccgggctcgttccgtcggcggggctttcagccagacctgctcatgccgcagggggcactcttgtgcagagggcgttccgacagcttcactcctgcaaaaccagaagaagatgctgtcggaaatcaatgccggatacggcagaaagggggaatcgtatcatggcgatatttcactttacagtaaagattgtcgggcgcagtaaaggaaaatctgtcatatccgcatcggcatatcttaatggagatgtgatgaagaatgaggaaacaggcaggatcagttactatacttccaaaaaggaagtcgtctacaccagtctgatgatgtgcgaaaatgcacctcctgaatggctgcatgtaccggaagaaaatataaaaaggtttcaacagtctatccgttataaaagagcggatgataaagatgccgcactggaaaagtttaaaatcacatttcagaaacagcgtctatggaatgaggtcttaaagatagaaaaaaatgcagatgcacagcttggacgctcatttgaattttccctgccgaaagaatggagcagacaggaacagattgattatacaaccgaatatattcaaaagactttcgtggataagggaatgtgtgtcgattggagcatacacgataagaacgatggaaatccacatgtgcatttacttgtaaccatgcgaccattcaatccagaccactcatggggcaacaaggaagtcaaggactgggattttgtcagagatactgacggaaatatcgtggttgatgaatcccacccggactggtggcaggataagaaaaatcctgaccggcatggaatccgcattcaggtacttgatgaaaacggagtaaagaaagtcggggcaagaaaccgaaaacaatggaaacgggttctgaccgatgctaccggctggaataatccaaagaattgtgagttatggcgaagcgaatgggctaggatgtgtaaccggcatttatccatagacaatcagattgaccaccgctcttatgaaagacagggcaaattaaaagtccctacgattcatgagggtgcggatgcaagaaagattgaggaaaaatatctcaccggacagataaggaaaggttcatggaaggttgaggaaaaccagatgattaaaaaacaaaatgcactgctgcaaaaggtaattgcaacctttggtaaggtatccggtgcattgtctatgtggagggagtgtttgaatgacattagaagaaagcaaagaagtaattcccatgatggaagcaatgattacacagatagaggaacagcagaatatcatggcagagatgcttcaggagatacaggaaaaggacgagaagctgatgtgctttcaggagcaggaagaacgattgcagcaattagagaaagaattgtcagagctgcttcaaatcttgccggatacagaagaactgctgatgcttctggaagaaaaggcagaccagatacagcgacttacagacgagaatcagcaatggcaggaattagcacagaaattaaacagcgagaaccgactattgcagaaacagaacagcgaattgctgacattgaacagcagatagagaaagcgagggatatagatgatagaatacgaaaactcaaagagcgacgatcaactggaagaattgctactgctgacggagcagatgcaggaagaactcgaccagaaagaccggactatcgaggaactgaaagtgcagctcgacgaatcgctgaccttgaacgagaggttaaacagcgagaacagagcagggaacattcaagccttaaagaacgacttgaggaaaacaaaagaattgttgcagagcgagaaagagaaaacgcacgctgccgaaatcatgacagaggaatgtcaagataagctaaggcaggcagaacaggaacgggactatgcactctctcatcagaaaaaagtagagataccggttgaaaagccggtactctatcaaaagtgtgggaactgtaaccagacagcttatctgaaagccaaggaaaagtatgatacgcagagagaaaaactggaaggcagatataaaacaaaaacagccatgtatgaagcattgatgtttctgctgatatggtattccgtatcaactactctttttcagatgatacggtcaaaaatatttatttctgattgcgtggtattctttgatacaatcgccacttttatacagaacattgcaggattgactatactgacagggaagaatgtggcacaggttagcaatggaatatccaatcctgtcgttgccggaattatatactggatgataagaatactgatttccggtggatgtctggtgggtgtgggaatacttttggcattcatcgaaataaagattgcagggctatataagaaatactgttgggatatgattaccataatggtgatactcgtaagtatggcaatagcaatctatttcgcagattggataaggacaatattaccagtcaatctactgtttctattgttattggtacaggtaatatatgtcgtgataagatggtatgtgaaaggctggcgggaaacaaggggatattactaaaacatactataccatgcctaaaactgttaaacaataaatcggcataattggtcatttcatgatgcaagataaaaagactgattatgtcgatatacagattctgtgaatgaatgaaagtggataacttgttttgtccgagcaagggaactataatgttttggtagaagtaaaaaagacaaccatttggttgagaaaaaaagatgcagaaaaacctattgacggaagaataaaaaatcaaggagtaatcatgatagaaaacaagataatattgattgaagatgataaagaaataagaggaatgataaacgattatttatcaggagaatttgaagtgacagcttttaatgatggtatgtcagctatccagaaaattacaagctatgatgaatatgcgcttgcgcttattgatcttatgttaccggatataagcgggatggagattattaagataattcgtaaagtcagcaagataccaattattattattactgctaaagacaatgatatagacaaatcattaggattgaatttgggtgctgatgattatgtggtaaaacctttttcactcattgagcttactgctagaataaaggctaacatcagacgagcaagaacctaccaggcgttaccgaataattctattatcaaaattaaagatatagaaatcgaccctcatagtcacatggttcagcgcaaaggagtaaccatagatttaacgccaattgaatttcaaattttatacattttagcaagccatccggggcaggcttattcaaaggaaaggctatatgaactgatttggaaagaaccatattttggaaatgaaaatgtgttgaatacacacatcaatcgtcttcgcttgaaattgaagagcaatgcagaagacagtacagcctatgttaaaactttatggggcattggatataagatggaggagaaatagatgatgattttatttgtggttctttcatttgttatggtttttatattgatctggcaacagatacagcataaaaaattagtacgagaaattgattatattacaagtaggcttgatactatttctgtcatttctgaaaatggctttgtacttatacctacagataatgatagtatcaagaaattaagcgctgcacttaataagctgcttcaagatttttatacaaaaaagtcacaatttgagcagagtaaacaggcaatggcgaaagtccttacaaacatctctcacgacatccgaactccactcactgttctaaaaggaaatagtgaaatgctttccaatataacaaacacttactctgcatctgaaaatgttcatgctatggctgttaaaatagaccaaaaggctgatgatttaatctcaacaattaacgactattttacaatgtctaaaataacttctggagatttttctattaaaatgaaaaaggaaaatatatcaaggatttgccaagatacaattttggactactatgaccttcttgaacagaaacaatttgaagtcaatattcagataccggatacaccgatttttgcctatacagataacgaggcgttacaacgcattttaaaaaatctgatagacaatgccatccgacatggtggtgatggtaagtatatttctttaaggctcaccacatcaaatggaaaaaacattattgaaatagaagatcgaggagatgggatatcaccacagcagcaaaaacagatctttgaaaggaattatacaacagcccgaaaaacttccggcagtggtttggggctttcaatttcaaaatgtcttgctgaacaaattggggcagacttagaagtttatagtgtacaaaatgagcaaactattttctcaatcatcttgaaaaagttagaaaatcgttagatttatgacagagaaaagagaagtccattttgtataatggcagctataaaggaggcacacaaaatggattatattatggaaaccgtaggtttgcgaaaagcctacaaagataatattgttgtagacgatgtaaatatgcatatatctaaaggggcaatatatggctttgttggtccaaacggcgcaggaaaaagcacggttatgaaaatgattttgagtcttatccagccagatgctggagaggttcagcttttaggtgaaaaagttaccagtcacagttatgaaatattcaaaaaggttggttctattattgagaatccatacttttacgataaaatgactgccagacaaaacttagagctgcactgtgagtatatgggatttcccaacaaggaacgaatcgatgaggttttgcatttggtggacttgcagaatgtcgagaaaaaacaagtttgtcattactcgttgggtatgaaacaacgacttgctattgcaagagctattctggcaaagccagaatttttgattttagacgaaccgatcaatgctttagaccctgagggtattcgtgaaatgcgaaccctttttcaacggctaaatcaagaagatggaacaactatttttatatccagccacattctatccgaagtggatcttcttgctgatacgattggaattattcaacacggaaaactcttaacagaattaactatcgaagaaatccataagcatcaaacagattatatcagcttgcaggttgacgatgtgactcgtgttgctgcactgcttgaaaacatgagaatcacgaattttagtgtattagataaagaatttatccacatttatgattctgatatttcaggtaaagctctgtcaaaagccatcattgagaacgggattggtttggagagcatgggacgcaagcaagacacactggaagatttctttttccagcttacagaggaggaaaaatgagatgacacatttgatcaaactggaactgaaaaaatttggtattgcacaaaatattatctttatgtttgccgcaattcttttcagcatccttttcattacaatatctttatgggatagcatgacagaccccaaacaggtcaaagacacatttgaaagcacataccttgtcattggcttattgatgtcattcatttttcttgtgtactcgtcggtcttaacggcaaagctggttattggagaatataatcatcgaacaattacgattatgttttcttatcctttaaacagaataaaattgattgccagcaaattaactataatcatggtttatacagcgatttcaatgacgattggatatatctgttgtagcagttatattatatttgcggataaatcctttaatatgctggagggaacatttcaaccatcaatgctccgaacatggataccaatggcaataaccactgtgattatatgtatggtgctgtctctgtggtcatttattattggcatgatcagaaaatctgttcctgcaacaatcgttacttctttgattgttattgtgttacggcaagttattatcaccaaaaacacaaccaatcaggagtccataatgcaagttatcttagttgctattgttaccgtcattgctacactacttatctttaaaagaaaagtgcctgaactatattgattatttctatttttacaaatggtaaaagaaaaagccgtcgcaaagcagattcaatttcatgtatttatataacggcggctttgatttttaaagtcaatgtttttagtgattacacaaacagatgacaacttacatgtatgtggtagctgacgtaagtttggattattttaaaagatttccaatgaatcttccgcatctacccacatctgcatattcccatccagatataatcgtacatattcaagcggttcatcaattgcaagtgcatttaatgcacaatctgagccaggcgtagtttttaaattcttttctgcttcccaacagtcaatgcggagcatatagctcgcagaggtataaacatcaacactattacgttgtggattgtattctgcaaatattgttctcattgtatcaaatctccttatcattcaatcaatcatttcttacaaaatcagaagcgtttcaatcagttcaccatgtcattttcattttgtgctataatgtgttatcagtttttttgcccttgtatttgcccttatcagagttcgtaaacactggtgggacgatataacacaagggaaacaataagggaaagctcacctgcgccaaacttagtgttttcaaaggcttgagagatatttgataataaaatataacaattattaaatcccttggaatacatgaaatctcaattcaagtttaagttgttctttaaaatctctatcctgcatatcatctacagttgctactcgtttttgagatttaccaaaactatttgcatatatctttatatgattacgaatatcttttaaatcttttactattgattcagttaataaattctctcctatatactcttgacatgactggacaaataatgcatagtaaggaattatttccattccaaaaacagaatcttgttctgtctttaacaaagaatatatattctccgcatcttcttgcataatacgaatacttattaaacgctcatactctgttattcccttcatgccattctcctctgcaatactacttagtgtctgctaattaaaccgtttccggttcaaaatcagcaggttgttgtctcgcgtcaaattaatcttcccacctactgcacatataccgcagattgaattcgacatctttcatatcgtttctactctaacgtgctgttttttacggcacgtttttatctgccctattgaccattctttccctatcatctatagtcagttttgtaaccaataaaaaagaaaaggaacagccctgaccaaagttcgttccttctccataccatacaatgagtgctgccggcaggtcttacaggatctacgtcctaatggtttacgcctgtctcgttagcagtcctctcaatgcaactattatgataagaaaaaactctccgttttgcaagctgattcgtataaaaacttcatctaaatttatctttgactcctacatggctgtatttcaaccggaactggagacctgtccggtctgcggaagctgtggcaactgtcatgttcatgcttattatgaccgctccgttatcgatttccgaaacgggagaaaggtgactgacagtctctgcgttctccgtttaatctgcgacagctgtcatcatacccatgccttgcttcccgacatactgattccgtatgcctcttattccctgatgttcatcctccgcgtactgggggaatgttttcttggccgttctacaatggagcacctttgcgacagattttccatcacaccagttcagcttcataaatggctgaagttttggaacaagcataaacagcagtagcttggcattcttgaagattccgaaacctctgatgcttccttcctcaagggccttgcagtctcagattcctactccgcttttagcatgtcgtttattcggagattcacctgcaactttctacagtcacatgaaaatcccaccatgtttggcacaaaaaccgcacactgctgtcagcgtgttttccagccggatatctccatctggcgaccacacgaccgtatatggctttccgatttctgcatggttatgataattacaaaccagaaaaggagggttttcccatgccaaaagatattgaaacaatcaaaaataatgcggctattgcccagttccgctttgcaatcatagctcctgttgttcaggggctttatccggatgcatcggctaccgcttattacaaacgcgtcacacagaatccactgacgcttccggatggttcatccgttacctacagctataaaacgctggaaaaatggaaatcccagtattccatcggcggtctggaggctctgatgccatcttcccgttccgataaaggttcttccagggctttaaacgatgaagccatcgaagaaatctaccgactaaagaatgattttccacgtatgaatgccacacagatttacgacaagctggttcgtgattcctttatcccggctaccgtcagtgtggattccgtacagcgatttatccgccacaatgatctgaaatccgccagatatccgaatcttcgcgaccgaaaagcctttgaagaagattccttcggtaaaatctggcaggcagatacctgttatctcccatacataacggaagatggaaaaacacgtcgtgtctactgcattatgattatcgatgaccactccaggcttctggttggtggcgaactgttttataatgacaacgcctacaacttccagaaggtactcaaaaatgccatcgccacctacggtattctagataaactgtatgtagataacggctgcagttacagtaacgagcagctttccatgatctgtgtttcacttggtattctgcttcttcacacaaaagtccgtgacggagccaacaaaggcaaagttgagcgacacttccgcaccatgaaggaacgatggctctataccctggatatcgattccattacctcgctggcacagtttaacggtatgcttcgggactacatgcattcctacaccacaacctttcacagaggaattgataccacgccttttgatcgttacgaaaacacgaaacagcatccgcgcagaccgctttccagagaatggcttgatgactgtttttacaaccggattacccgtaaagtcagaaaagattctaccgttaccatcgacaacgtatgtctggatgttcccatgcagtttatatctgccaaagtggacatccgttatcttccggacgacatggcgtctgcttttattctttttgaagaagaaaagtttccacttcgcctgaccaaccggaatgaaaactgtcataccaaacgcaacaaccttacaattgattatgccaaagcaggaggtgccaactgatgtataactctttctataaaaatttaatagtgcctgacaccactgtggtcaacttaagtattttagaaaaatttcagaattccttcagccctgatttcatcggcatttgaagaaattcttttcttttttacaaaaaagtacttgacaaaacctcctgaaagtgaggtcgcttcgcgacctattaatcaagtaattgttcgtctcgccacgaactttaattacactttaggaggtatgtcatatgaatcgaattgacatctgcaaaaatatcatccaatctctagtaggtcatgaggcttacgccccaatgcccctattcaaaaccgtacgtgcgctattaacgcatacggcttttcactctatattctcatacttaccgataaaacaaactaaccttaatgcttggttcaagtagcggaaatgttttcagaagcccattatagaaggtatcaaacgtgtaactccttctctgactcctccggttcaaccatttaaataacagcctttttgtctgcgttaaataattctttacttctctggtattatccgtaactccataatactgatagtgtccccgcagttttgcattcaccgttttaaaaatcagctctaatggcattgtcctgtggtcttttatccactctttcatctgctttatcttgctacgcagtttcttcttgctcgtctttacccgacaacggaaaaattgcttctttccgtccattccacaataaaacgtgaaaccaagaaagtcaaaggtatctggttttctttctcctctgcgttccctgttttgcctggcaaacctcccaaattccagtatcttggtcttttcttctgcaagctccagtccatatttcttgaacctctcttccagtctctggcgaaacacttccgcttcccgcttattctgaaaacagcagacaaaatcatctgcgctatgccgaaatcggcatagtgcggatgattctatcgtcttttcttgccagttcatcaattatttttgctgaatcatctggtgaaccatcatcgcccaaaataatttctatattcttatagtcctggttcattactgattccactgttttgaaaataaatttttctacgttatacacaggtataataacgctcactacttttttcatattatgcctctttcttcataagatatttatttgtaaaccataaaatcctaacaaaccaatcggactctactttcacaaatctcgtattttagcttatgaagatcaaggcattttatagcgaagccatcgcaagccatctcccaaaaaggatttttaagaccagaaaatgtacatcctgctttttctggccttatataacccagttgatcacaaattttttcagcgttcgaaatatttattgcatcctgctctttgtagccataacaactattacttaatagcggttctgccccctataaatttcatattatataacacggtctttacgatatttttcaagtacttcttagggtaacatctttttactgctttcttaaatccatacccctttttcaatttcttaaaaaacactgcccgttgcttaggcttctgagagggctgatataattgatgattgctttctatcgcttttttcaaatcaacatctacaagagttaaatctgcttgatctataagttcttttcccttttcattttggcaaagcactaaagaaatacccttatcttgggtgcttttttcaagttcacttccccatgaatcccccagggtaatatcaccgggcctttcaatcttggcatattgacattgataacaattctccgtgtatgttgtcgagttcaaaaatgtcatcatataattatcagttgttatcggaactgcaaaacgctttccattctgttccaatttaaaattatttttctcccgaaatctaatgctttgaacttctgttaatcgaatcccataatcaaacaaaaagctgtccaaaatttgtggtgaaggtgttccatggcaaattaaatcagcggtatacaaattttgatgattctttgtataatgcctgaccgctgaaacctgacatggcaacccaataaaaagcacctttcttcccaatttgagtttttgtaaaattttcttatatactccctcaggattacttttcacatattttgaacctgtaaatttacatacttcatcttctgtctcagcaaaatcaaactcaaacttcccaaaactaaatgtgcagctacaaacaatccctccattttttatgaaagctcgttctactgctgttgcaactcctccagatgaagaacgcatacgaacgcaatcatcttgcgcccatccctgtttccaataaatcggtttagttagtacttgttctgcgttgttttggcatgcactatggcatgcattacattgaatacatttctcagaatcaattactgcattatattccatccacgaatcaattacttttatggcttttttagggcaaacatcaatacactccatacaccctgtgcacttacctttttcacatactgtagtcatatcatcatcttccttttaattttagtatttttctcactatggggagccagatatctgaaaacaaatatatagtaacggctagaatgacgcattgtagtaaaaaaccaaacctattatcaatgaacatcaagcccgcagacaacactaaagccgtacttcccactataaattctttattatttatattatattgaatatattttcttgtatgaaaaagtcgaaagacaaatacaagtatataactaatacacgtagcaattgcagcaccataaacgcctacttgtggaattaatataaaattcattgcaatattaaatattgctccaaaagtaccagaaaaaagatagccaaaactatctttgtgaaccgtatagcttgtagccataaaactagccattgtcaaatatacgcatccgactgtcaaaaacggcgtatatttccatgcagaataatactcttttcccacatacacacttaaaaacggtttcataaatgttaacaaacctattccaatcaacataacaattccaattagaactctaaatattttattattatattcgctttcatcgtctgttccttcttcacgaattgcagaataactccacgcttgattgaatattgttgtcaatgtagaaactagcgtagggaacttatatgaaacggcgtaaattccattggctgccacacttatcatgctagacaccataatgcgatccgaggaattcataatccaccacataaatgaattcggaattaatactacggaatatctcgccatcttgatcagtagatttctatcaatccttgaaaatgagaatgatttatatccttttcctacaataattgcatatatggcagtgagtgtatttgctataatgtaagcttttaaatacccatcaacaccttctttaaagaccaagaggaacagaatatttaacaccgcaataaaaaaagtatgtagaacatttcctatcgagtaataaatcaacagttctttcccgcgcaaatcgcacaaataaagctgacttgctgccaaagaaacgacatagaaataaacaaacacggcatattcagaaatcttgtcaaaagagtgacatatcggaaaaatcaataacccaaccatcattccgattaacagtattcccgtccctatttgggtaatttttctagtattggcatccttatccaatgcgaacctcataacagactcacagatatttaaagtaagaagtggaaccgcaactgttccaactgtcgcaaccaaatcaacgactccatattcagcagttgtaagtgcatttgtatataacggaatcaaaaaaaatgaaataagttttgatccaagatttcccaaagtaaatataatagtgttttttatcaaataactgtttctgctatttcccattctctactgcttgctccttgattatttttatagtcatctttcattcaaaaatgaaatccaatcaaattcatcaagccaacgttttccagtaaatttactttgataatcacaaagattttttacattttgtatatctgcttcgcttttcggaatataatacgccgaacgatactgtgaatattcttttactgtaaaaatgactttatgtttaaattccaaactatcgaatgaacaaatatcctgttccgtacatccatctttttgcaccataataatataaagattgtccatattcagccgcttcaaacgttcgatccatttctgttttgcctgttcaaacgtttcataatgtgtaaaatagacatggatatcttctaactttccaaccggataaccgtatttttcactgtttttctcatccatttcgattttgcaatcatataaataatgctccaattgactcaaaaatttgatgaattcctttggagtaaaccaaagatttacagttggtgagttgaatcgtaatcccaattcatgactcaccacccccccacacagttcattgaaataatcgagcaatccttgttttttattcttctttggtactctttatccatatgcatacgaagaattcttctataaatcttatttattttttccatctccgtcacccatttataagttttctttcaaatacttcaatgatttttctctttccaaacccagtatctgaccgatttttttcttatccagctcttttttcagcactgtttccaattgagagatatcggtaataacatgactctgtatttgaaggcgttgcgttaaatcctccaatttattctggttactctctcgaatcaataccgccattctctttccaaattttgcaccaaacagtgttccatgaaatgtgtccgttacaatacattctgcattctgaaaagctttcaacaactcaaacggagttagtgtttcatacgacggtatccatttctgccttccaaacggagccacaatcttcaaattgtacttcttgcagtattcagaaattgccctgatttcctctgggtcactaaatctctcggcataagaataaacaatgcaatattttttaggaagtttagaattcactgtaacattcctgatttcatcatcaaagtttcctacagccaccggatctaaattatatacaggctttttttcggaaatcttctctacaaagtctgcagtgtttttatcccgcacggatacaactgacaaattcgacatcgcacttttaatagcttctctcaattcgtccgacaaatcatccacttttgtcgatccgcaacttgctgcatatgtgattaccctttcagcagcttcaactttcccaaatagctgcgaagaaaaaccccatttggatttttgtaagcaattgaaaacctcatcacttcctattacgcatgtatcaaaatgctcgtcgccgttcacactattcagacctgtgctatttctaaattcataaaaaactctccgcaaatttcttccaagtattttgcccttaacgcgattccattgtgtttctaaccagctatcattttttttgtcaatatcctttttttcacattgtatacttagagcatcatccgttcctttttctatcgcaagaaacctcacctcattacctagactttctatcattttttttaatgaatacgcttgtaagacggatccgtaattgttaacctgttgcattgataaaatatataccttcatatttaatttctccttcaatcactcgaccgtattgaaccatcggcatcgcaattccatcgaattagacatacacctaagaaaaaaaaccagttcaaggccacttcaaaaattgatgcaataatcattccatacacaataattgaaatataaaaagacttatctgtcttgagagtatttttaaagctccagaagacagtaacaattaatgaaactacactcaaaaatcccatattcaccatgatttcaagtaatccgttctgtgcatttgcatataatcctgtcatattcttcatcatcgaattgctatacccatatccaaaccagaatctacttctaatgatattcagcaaataatcattatatatttccaaacgcccagtcacggtgtaagatctgttgaaatatccaaatacgatattatttataaattcatttttaagaatttgtcccatcacaaaaacaaccagtgcagacataattagtgctgttaccgcaaatttttcatttaacagcaacattctgattttttgaaatggaactattgttgctataaacagcactgccaaagttaccgtagccgtagcacaacctatgtataaggtaagtgcaattgaacttataaacaaagcaatatagcaaattttatttttccataaaatcttctcatgtgttgcaccatataaagcaacaaaaaatataaataaatatgaagatgtgaatttatttccaaagatatatgcagactgattgctgttattcactgtaccgaccaataatattgaaacaattgtcaatatacaatatagtccaacgatattgtataagcattttattgtctcgttaaatcgatccttttgcttgcaaagtccaataaaagaataaatatcataaaatgtaacggcatagagaagtgcgtccaaaaagtctttatcctgatatccacctttaagatatgccataaccgctgaaagcaaaacacagccagaaaataaccacgacaaatttacaattctttcttttttttctcttgaaattgtaaacaaaaaaacgcttatgagaataataattttacttgcctgccttagtcctgcaggcaaaaaatatggtttaataattgcaaataccaacaaatatgtcaacaagttatatacattgattttatatgtaatcttcatcctcttatccttgcatcttcattatattaatcctatagtacaatcttaaactaaatgcaaacagaatggcttttgctctgtcctttttaaagcaaaccttacgcaatggataaaaccgatcaatctccatattcgtttgatacagtcttccttctgtcatacctttcatataaagcatcgcaatgtgattatccatgtatttttttaattctggattcttaatttcatttgctaatatatctaatttcttacaaatacagagcatatcttgcccatgttttgttttatttcccgatcttgtaatagatccttttcttcttaaataatggtaaaacacataatctgatgtatatactttgtttgctctcaatataacttgtggtgtccaaagctcgtcttcatgtagaattcctgactcaaagtataattgattttctacaataaatgctcttttgtacacgccgaagcaagctgccgcatacaaattcctttgctttagttcctcaagtgcaaacttctcacctgtaaaagaacaatttttagccgacacatacccatattttattaattgtttatcggtactttcgtattcttcacaatacccaaaatatataatatccggtgtattttccttttcaattataccttgtattttagcaatgcatccattttctacataatcatccgagtctaaaaacataatatattgcccacatgattcttttattccaacatttctagtatcagataaacctgaatttttttccttagcgattacttttacatttgtatatttttcatatttttttgcaatattcaaagatccatctgttgacttatcgtcaacaacaacaatctccatatctgaataatgctggttcaacaaactttctaaacatttgtccagatattcttcaacattatatactggaactatcactgaaataaacatttttcacctctataatataattaagtatcattcgcttaattatattttcgtaaataataactttccatatattttgcagttgcgtccatatcaaatcctgcatcaatcacatactgctgcatattggtatgtgctttcagattctgtgccatttcaagtgctgcattcgcccacttttcttccccatcactcaacagcagtttccggtagattggtgtaatatccgtttccggcggcaatccttcagagcagacaataggaacacctgccgcctgtgcttcgattgcaacaatacccagaccttcaaacaaagatggaaaaacaaacacatccatcgcttgataaattctgttcatatcctttctatttccaagaaaatgcacacaatctgaaaggcctttttcgaccactttgctttttactttctcttctaatggcccggtgccaacaagaatcaattcagcgtcaggcttttccttcttgatttctgcaaaaacatcaatcaggaaatcatggtttttctgaggatgtaggcgaccaacatggccgacaacaaatttatcctttaaccccagttctttcctgatttcatttctggtatccgcatccgcaataaagttctgcgaatcaatcgcatttttcagcacttgaaacggcttgtctttgaacagatattttccagcttcctcagagcaggcgaaaagatctgttgcgtttttggtaaacattcgctgcatgaacagcttcggtaaatattttatatcgtgtactgtctcattattatgtgaatgagcaattctgacggggatacctgctttctttgcagctttcaggcagaaatatccaatcgtataggcgtgacagtgaacaattttatattcgtgatgctgagcaaagaaaactgccaaatctttttgaaatttaggaagattcaaatcctcccggaaagacagcttatgaacatgccctcccattttttcaatctcatcatcgtaaaactgtttttccttataaacgaccaaaaaatcaaactgtactttcgttctgtcaattttccggtatatattcatcaacaaagcctgcgtaccgccagcttccattcgctgtaggatatgcaaaactcttatcggctctcccatgtattcttcctccacaaaatctcaaagagatttgattttttgaatcagtttattcggcagcacagattttagtcgcgctttcggctgaaagccaacctttatattttctataaagcctggttcatcgatgctcttatagaaagtatctctagtcacaggcctgttgctcggttgcaccagattatgctgcttcaccatgccctcttccaacgttgcttcttctacttctgcaagaactcgcattatttcaaagagcttttgacctttttcggtatttacaaatacactggacacgccctttggagaattgaagttcggatggctctttgcaattccccaaaaatcacccactgtcaaatctcccatacggctcgtattcgcataagcacactgataacagctctccctatagcagtcgccatccataaaatgttttccatagcgatcaagggagagtgtctttgtctttgtctttgtctttgtctttgtctttgtctttagcaggtattgtgttccccagcctcgcttgtctttggagcggaagttgaagtagattactctgcctgccgtctgcttgttctggtattccagatactttttgaagaacttcggcgaaggcacaccgtggcaaatcagatcaaccgtatatagattttctggattgccacccaaaaaagcatacagacccgcaatctggcagggagttcctgtaaaaagtaccgttttcccctctgataaacgctgtttgacctttgtgtagctatctttcgggtcagactgaacatacttagaggactgtagtttttctctttctgcttcatttgtcacttcaatgtggtttactgccagctgctcatcataggcagcaccataaaccacaccgcccatttgcaatatggttttcgctgcacaatccgccgcaccgccagatgcagagcgcataacatccacatcatttttattgcgccacgcccagactttatgtggcttattccgatgaaatcccgtattttctacggggcacttttttaggcacaccttgcactcgatgcagctattttcatcaacagtcggataccaaaagccctctttgttttctaccatagagatacagtgttttgggcagctttgctcacagcttttacatcccacacatctctcttttatcttcgatatgttctccattttatccctctaaattttttctcagatactccttcgccacttctctatgtgctttcaacagctcatcaacttttgcgtaatcaatcgtcttttcattgatgttttctgcatcttcaattttcgttgtcatccgatcagctagtttcagccgttttagcaaatcactcagtttttcttcattaccatagctattacccacgctcttacgaatcaatgtcgtaaatggccgatgcgtgataactgagaagatgctgccgtggaaagtatcggtaatgacttcttctgcatttctgaaataagccagaacttcaaacggagagcaatccacaaaacggtctgcacatttctgaataccgccgattgcataaacctttagtttctttttctttgcatagtcagaaatccagtctgcctcttcattagaaatacgacctgcatacgcatacagaatcaaatacttctcattagtctgaacctgtgggattttatcgcagcagttcatgtagtcataggtcaaaaccggatccaagttatacaacggttctttccccgtaagctgctcaacaatggctccagaatttgcatctcgtacagaaatcgcgtcaaacttcttcagcaaagctccgacttcatcggtctttttatacttttccaactttactaatgttgtattgccgaaagacgctgcataagtgataagtttctttgcatggttattttttccaaacaattctggcgaatagcccacattggaatttttttgaatacagttaaaaacctcgtcactgccaatcacaaggcaatctactgtcgggttgtagttcatttcatctgcaattcccaaaagcggcatatacttttgagcaaaggactgtttatatcggatgaacgataatttgtgtgcaagaggagcccgataccgaaaggtctccagccccttttttatctttcggacaaccttgtttttactatctgcattttctacaattactggagcacctacatggtagtccacaaattctacattacagccaacttcctcaattagctgcttcaatgcatatgcctgcaaaaacgaaccgtagtttgcaatgcgctgcatcgacatgattccaacttttctcatccattcatcctcaatacaattcgtttaccagtttctcaagttcttcattaaacttggcattattactactcataccatgtcccatgccggcaacaatctgatcatagttcgttatgatatctcccagtgtattaatgtcctccaccggaataatcgttcccattctctgcgccacattccttgcaaactcaacttgatggtcattcacatgctcattgaactgatgctggcgcggcacaacaataggagtcttacctatctgtagtggcatgataaaacttgccgggccaccgtgagtgattacaatacgggcatcatccacatttttcaccatctgctgatatggaatcagcttactccactgacagtatttcggctcgtatgtactaaaaccagtctggataattacatcttcgtttataatgccgtctttttttaattcatctattttttgaatcagccgattaaacggctgctcatgtgttcccaccgtcacaaaaatcattttctcgtcccctaattagaatatgctgccaaggttaaccgcctttggataaacctttttctgctcttcccactgcacaacaaacttgtccacaatggggtagaccatctttcctgtcattgtcggtttatcaattcgatcaaaaacctcgatgtagaccaactttgcgcccatcattttaccaatgtagaagaaaggaaccgcaactgctgcaccgcaggaaataattaaatccggcttttccttgtgaagcacattccatgcaatcttggtgttcttaataagagcctttagactccggtttgtcggataataacaaggatacattttttcaccttcgagtaggcttcttgcatcctctttatcaaacgtaacccaaaaatgatccttgtccttccaaaatggctttaacatataaaggtgggttaaatgaccgcccgatgaacccactaaacatactttcataattcaaactccttcattcccaaaatatttatgtgtacatccatccggatgaaaatgcttatttataaagtgcggtacaatacccacatctgtgttcatcacacactcttctaagtctttttccttactgtcatactctttcggtgcagcaatcacattttctacttttctccgttttatcgagtacacctgtcttgcttttgcaatcatcgaagtgttgttttatactgtcaaaccccgtccatgctcatatgccatttttgcgaagtgccggtttatacactcaaagggcgtaggcgcgtatatgttgttgaaactgtatatatcatccactttcaaccatatctccgccgtcactatgaacaaatcatgcagatttttcactctcgacaccccgtctttatgtacctatcatctccacgacaggtctactcaacagaaaagttgcgaagtagaaatcgccatttttcccgatattttcatgactcaataaaccgcaacaaaataatcctcatatttaccgacgatagtgtactcaatagaactttagcagagtaggtgataagctcatggatttttgatgaatttatcatctgcgccaccatttttctcattccacccgtatctgccttatccttcccactatgtgttcctcatccaccggcaaactgtgtaaatatcacccattttcacctcatatatcagggcgttttgcaacgaatcttcggtatgttgagtgtgaaaatcgggttatttttgactatgctacgttgcttctgtttgttgagtagacattggttggagccgctattacaacaaaatccgcatcagcatatgcagccttagcatccagcgttgctgtcagattcagttctttttctgcaaggtatttttcaatataatcatcctgtgtgtttcagaatggtatttcacatcttcataaaacctgtatctctatcacacactcacccgaatctccccatcctctttcttcacatcaaaaacaagcggatgcttctttccccactccggatcttccttgtccttctcattccattctttccatttctgaatgaaaccattgtggattaggttctccgctgcgagtcttgcctgcaccgcttcgtcataattgtcaaaaagaccaacataatagcgctttcccttgaatccgatatccacacgatatcgattacaattcttcaactggaaaacgccacggaaaccactcatattatcttttctgctttttcttttttctagtacttcaacacaggttccgtctacgagatgtcgtctctgcgcaatttcctgacggttcttcttttgtaaacaaccgcagctatgataattaccatgcacaagacctgctgccgtcacatcaacttcatttccgcaatcacagacacaatgccaataaacggagccccgtttatcccttttttctgtcgcatatttggttgtcaacataccaaactttcttcctgacagatctgctggtcttcttcccataagtctccaccctttttgcatgaaatttcgtagagtagattactctacgaaatttttacggaaagccttggaaatcaagggctttcaggtgtctgaccaaaaaattgacggtaaataaatgctgtgaaatttgtaattatgattaatttttaaatacatgtgattgtaaaagaacgaaacaacttagataatttaaaataaatatttttgattttctgatctggtagcttgtaaattgactgacaattgaccataaatttgacggcgaatagataaaaatccattcaaaaaagatgattaaaatgacgaaagtgtctgtttttcgattttttttgctaagagattgtataaattcatgaaatgaacgtatatacattgacagaaatgtttgaaaagagtagactatatatgataattatactaagatttgaaacaatttaaagaaaaagcgtatttcgtagagtaatctactccacgaaatacgctttctttttctattctgaacttttctctttttccccatacacctcaaagaaactgccccggattataaatacaattattcccacatggctgaccagcaaagattttcttatctaattgatcgatatatctccctgcctctttttcttctctttgatccccctccagaagccccagcgcagccttcagattccgaatatcccggatcatatcttccacataatttcctcgtccaactagtttcagatgggtaatccctgccgcctccagctgtggcaacgaacacagagcacatccactcttcccacagagatattgttgctcttgttgctcttctatctccaatgttctttttatcgctcgttccatacgctcttccatctcagcatctccccagtaagctgtcctgcacagataacccatttcgtcacaatgaagggaattgcagaatgctcctgtgaactgacacaattcgttcaatgcaaaggcctcgaattccagtctttctgcatttacagcttctatcatctgccgcatcgatgcaactgtatttttcctgtggaaaatgatccggtcgattcccatttcctgaaaaactttgattgcctcccggttcatttctccgacttcaccgctgagatggatcttacaggatatgcctttctgtctcaggtacaaaatcaatgccggatcggcaaggatgaagctgtcgaatccgattttcatacactgtttcacaatgtctgcaatctcttcatattgttccggaatataatagagagaattcatcgcgatatgtaccggctttctgtacttcctgatcattgctgagaggatctctaattcactgaaagaaccgagttgcacattataagccagcacttccctgcggttcagtggaagtacggttccgtatttttttgtccagttatatggcacatatccgcagaacaactcgtctgctcctgcctggacatatggaatatattcgtctacaaagccaaatcctgcaacgattttcatccttcgctctgctttttctttttcattctgttttcttttctgtgtctccattcttccatcatccttctgtttttcacatttcacaatagattgaccacaagacggttccattttattccgagttctctcttcaactgctccggttcgtccagtagatgtttatccaatgcgaacagactgttgtattttcccttcatatataaatgctttggatagaagaagctatgttccagacacggtgccggacattcttgtctctccctttgttttccacgttcaccgtgttccagtacagcgcaaagtgtacaatagctcgacgtatttgtctgatagaacggcacgtgtagatgcttctgtatcttttgcggtatttcctgtgtataaccgcagctttcccactcataacagctgattccaaagctttcttccagataggtgcgataaaatcctgcattcagattattctgttccaacagcgtcttatctcccatcttgtagaacattcttggatctttcttccgcttatttaagagcgtcccaagacacgggatcagatgttctgtccgcttcacaagatgtgccagtccccaatcattgactacaacctcaagtcgtttcttctccgccccggaagtctcctgttgttcacaccactgatccaggcgtgtcaacagctgttctgtctgtgcaatcctgtcttcccgaataaaggaaaaggcaacagtcacttccatccgttctttatctgctttctcaagaagtgcaaagagctgttcttcttccggaaatagatgtggacagaattgattgcctagatacaaccggtccggttgtcttcccaggatctgcgcatcttcgattccatgctgctgccagtattctttcatgaaccgttcaatcggtctggtcagatattgttcgtatagtttcggctgatccagttctaccgctaattctaccggcagatttcggaagatctctgcattctgaaaccactctttattttgttctgtttcgctcctgaaatgttcctcttcttcctgtgcgggataaccggtcatttcttgcgccagatgtgcatcatcctgttccagcttgagcgaaatgtatcggctgtattcgacacagagcttctgaaaggcttctttataatcttcctgaactgtgaaaatatcataggcttgatagaattctgtctgttccccggcctctgtctgaaaatgacgaatttcaatctcccgatactctgcctgatccatctgatagaagcagatcttgaatgctttcggataaatgttctcctctgctttccctctcctacaaagccggatgcggaatccttcggatgaaatctctgtcaggcggacttctctttgcctctcttctattgaatcttctgtcataactccggccagaagaccatatggaatcatctgaattcctttaatccttcgctttttcatttgcttcctctctcttttacaaaatccttgcttgaacaaagaatgtgcctcggcacattcttgcgcctgcggcggtcgcttgcgacacttacattatacgccgcagtgtgcatcctaagcggagcgttttttatatattaggaaagcactttcctaatatataaaagatcgtgctgtcagcagaactctccgccgacagcacgattcctatactttttacttatatgattcgattaaatgttcagaagatcactgaatactttcagggctccgtctgtctcatgtgcaagtacgcgttttgcaaggactttaccgagctgaacaccttcctgatcgaagctgtttacattccacaagaatccctggaacatgatcttgttctcaaagtgagcaagcagtgctccgagagatgctggtgttaactggtctccgataatgatgcttgaaggacgtccgccttcgaagttcttgttacggttctcatcttctttaccacatgcaaatgctacaatctgagcagctacgttcgcgcagagtttctgctggcttgtgctgtcctggatcacaacatctgtaccgatctggctgtttttgaatcctacgaactgaagcggcacaatatctgttccctggtgaagaagctgatagaaggagtgctgtccgtttgttccaggctctccgaaaataaccggtcctgttacataatcaaccggctcaccaaagcggtttacggattttccgttagactccatatccagctgctgcagatgtgcagggaaacggctcagtgcctgggaatacggaagtactgctgtacttgggtatccgagtacatttctctcatatacaccgatcaatgcatcgagcatctccgggttctctttgatattctcattgagggacagtttatcctcagctgctgctccgtcaaggaactgtgcaaatacttccggtccgaatgcgagggaaagtactgctccgccaactgctgatgtagatgagaaacgtcctccgatatagtcatccatgaagaaggctgcaaggtaatcatcactctttgcaagtggtgaagtctcacttgttactgcgatcatatgcttggatgcgtcaagtcccgcgttcttaagagcatccttaacaaaggactcatttgtcagagtctcaagtgttgttcctgacttggatacaagtacgaagatagagtgagcaacatctacagaattcagaactgctgccgcatcatccgggtcaacgttactgatgaactttgcttccatcttgaatgtatcattcttctttgcccagttctcaagtgcaaggtacattgcgcgaggaccgaggtcacttccgccgataccgatctgaacaactgttgtaaacttctctccggcaccgtttgtgatctcacctgcatgtactttgttcgcgaactcagcaatcttcttctgctgctctacatagaaagtacgcttgtctacaccgtcagcctcaacagcatctccgagctgtccgcgtgtcatgtggtgaagtacgagacgcttctctcctgtgttcacaacttctccgttgtaaagtgcttcgaacttctctgtcagctgtgcttcttctgccagtttctcaagagctgagagaactgtgtcatccactttctttgctgcataattgtatgctaatccttctgccatcggaacgctgtagttcttcacacgctctgctccgttctctccggccatcactgctgcaaggtctacactttctgtcttctcaagttcctgataagaagtaagcttatccaaattgttccaggtaatcatcgttgattcctccttcataaaataaagttcatatccggctgtcgggttcagtatcttctgaccggcagaccatccatttcataaaaaaactattgttaatttctcaacaatcaagttcattatacaatcaatccggtgcaaattcaacccacaaacgatattatcagattgctgtccgcacatcgtataaccggtaataatatcagagcagctccgcaaacagacgtaagatcagctgtccgagtcttaagcccgcacttcttccttctttatactgctcggtcacttctctgctttctcccatcgtgcggatcagatcatcccggatctccagcactgcgtcgcaatctgccagaaagcatccattctcaaagtgatggtacaggctgcggtaatcgagattgatcgttccgcaggtcgccatgcgatcatctgccacactcatcttcgcatgacagaatcccggtgtccactcatagatacggactccatgcttaaccagattatgatagaaggaacgggtcacactgtaaaccatcttcttgtccgggatacccggtgttatgatacgcacatcaacaccacgctttgctgccagtgtgagtgcatgtgtcatctcatctgtaatgatcaggtatggagtgataaaccagcagtatttctctgctttattcgccatactgatatatacttcctcgcctacctgctcaccatcgagcggactgtctgcatatggctggacataaccacgctgttgtgctttgtatgcatagtggatcacatatttctccggtacaagttcttttgactttacatttccggctgcattccacatttccagaaatgctactgtcatagacttgactgcatctccttccatacggatcccggtatctttccagattccatacggatgtgtgatgttgaaatactcattcgccagattgtatccacctgtgtaagcaacctttccgtcaatcacagtaatcttccggtgatcgcgattgttcaggaacatattcagtcccggcagaatcggattaaatacacggcatttgattcctaaagatttcagttttgttgcaaaatccatgttcacaaaccagatcgatcccatatcatcatagaagatacggacttctacgcctgctttcacacggtcttcaagtaccgtctggatccgttgccatgcctcttcgtcttcaatggcatgatactccataaagatgaacttttctgcctttgaaagatcctccagctgtgcatccagccctttgattgcctcatcataataggtaacatctgtgttctgataaaccgggtaacaggagtaattcgtcagataagaagcgattgcccccgcctgcggattctcttttttcatccattcaagaatctgtctgttatccggaagatatgggagcagttttttatcaatctcttcatatctcgcccgcatcttcttcgtacttccattcagacctacgagaagatacagactcacaccaagaatcgggaatgcaagcatcagtatgatccatggcattttcatcgatgaagtcttatccatgctgtaaagtccaagcacaagaaagattgccacgattcttgttgcccagtcaataatagttgcgtattcacttacctttgtgaacagaaagagaaggaatacaatctccagcaagatagatactgctgtgaagatcagcctctttgttccgttctctgtctttttctttccttcgaatgtaccgctgctcaaatctacatgccccttttctcttttccttttaataattgctattttctctttgcatagaaagacggagaatccgatcactcagattctcctgactcttttaattaacacatactataacagatatggaaggaaattgaaacaagtattttctttttccactgtttttttattcatgtctaagtgcttcgattggattcatgttcgccgctttcacggacgggatcaatccgaagataataccgatcagtgtggagaacagcactgcgatcacaatcgaaactccgctgattgctaccggaactgctgagactttggatataatgtacgcaagcgcgattcctccaagaacacctataattcctccaagcagtgtcagtaccgctgcctctgtcaggaactgtgtcagaattctgcgctttctcgctccgagtgccttctttaatccaatctcgccggtacgttctgtaaccgacacgagcatgatattcataactccgattccaccaactaacagggaaatgctggcgatccaaatcagctgctgatttgtcgagttgctgatctcctggatctgtgttgcctgctctaacagatcttctcctttgtattttacggtatcatctgaaactgtcagcatagcatttaaaatatctgcggatttctctcctgccgctgtcatatcatctgtactttttgcacgcacgacaaggttctgcggttcgtcatactggtaaatgaccggccatacttgatccggaataataatctttccgctctggtcatctgacatgtagcggtagtaatcttccattgagttgatcaccggctgggactctgctttctttgcaaccattccaacgacaacaaaaggctctcccttgatctcgatcgttcttccgatcacatctgcattgtcgaataaacttgccgctgttgtcttgtctatcaaggctacttttcgtccttcggaataatctttgtctgttaatcctcttcctttggttacctgatatccgtaaacatccagataatttctgtcaattccaagaatcacgctgttacttaatgactttgcgccgcggtaaactgcgtcgtattcatttcttgtatgatataaagacgctgtctccacttccgggagttcaacgacctcctgcagtgtctcgtctgagatctccggcactccgtccgggagtgactgatactgcagatcgatcggccagtcaccctgatagagctgtacatttaccgcgtcatttcctgcaccgaccagattcttcttaatctgttcattcgttcctttgatcgtggacacaattgctataatggaaccgattcctatgatgattccgagcattgtgagcgcagatcttaatttatgattccagattccctgaaacgccagtctgatgtcttctaacataatggcacctcactctctttcattttgatactgttcagtcttcttaataatagtcgtacagggtatctgcttcctgtgtctttgcgccttctttgacatctctgccgtaagggaacgcgatcaggtcgtccattgtgaggccggaggtgatctccagtgaattgtacatatttttgccaacctctacatactgttttgttaatctgccattatcgccccgcttgtagacataatagcggtttccttcctcgcggacaaacattttttcaagatagatcgatccatcactacctgctgcaattccattcatcgacagattcacagactcaccattcgagagatttgcgtctccgtggatcacgagcgtgaacggatagaaggactgattctggttctctcctgtggaataatcgcttaccggtgagttgccaacacctgtaactgtcgcttcgtaggattctcccgactgccaggacattacagtcacagtcattccttctttgatctgatcaagcattgtctctccgactcttccggtcacatagaaaccttcttctccgacaacgctgacaactggtttgttctcattctttgcagacgcttcgtcagtcgcttctttgactacaccttctaccgtacttttgatcacgccgtccccgacctttttcttcagctttttcagttccagttcagcggatctcctggaaagatccagatctttgatcttctgctctttctccttgatttgcttcgtcacttcttcctttgacgggaggtccggggtgtctgggataaccggatcttctgaaatatccggttccggagttggttctggttccggagttggctctggatttggagtcggctccgggtctggagttggttgtggatccggtatgactacctgtcctgtttttccatcgaggatccaacaggataagaattttgtcggcgcttctgcgttatctactacatcaaaggcacacacttgaccctcttttaatactttgagcataaacggtgcatttacggctgcccccggtgcgcaaagataacgatacggtttttccattgttccgtctgcatcttctttattataaggaacagaatctaatgtgatctcactgtaaacctcttttccctttaatgcttcagggaatggacgctcgactgcggaagatggtacatcgtcttttttgttatcgtctttggatgtatcgtcttttgtattatcatctttcgaagcatcgtcttttgaagtatcatcttttgtgttgtcgtcttttgtcgtatcatccttcgaggtatcaccatccggttttttattctcatcctcttttgatgtattaagaacggttgtctttacagcactcatcttctgtacagttggctgttgttctccatctgcgcttgtctgcacgacggatgcccctgtatctgccttcgcggtctttgtccccttgagctgggtgatctctttctgcaggttctgaatgttcaggtcaatcccctgaatctgcatttctttcatctcaagctccagggaagaaagtgtcgtgtcgtatgccacaagacggtctccgactttcaccgtatccccggctttcacgtaaacctgtgtgatcggcatagtatcatccacgtaaatgtcctgcttttggttcgttgtgacggttccgtaacttgcaatcccgctatcatcgtaccagccaccggaattcacactgctgacaggagctactttaacagcctttccgctgttcttcactgcgaaaccgattccaagtgcaagaacgatgcagcctgctgccacaggaatgccgatcttgattattttctttttattcatccgcactctcctccgttcccggaactccttcctgcattgcattctcttctacaggttcttcgtaaccgccctcggctcctgacatatctgaagtactgcctgaagtactgcctgatgtacctgaatcgttcttcacaacagctgcaccttttttgcactcctcgcttggccatacaatgtaatcagaagctttcagtccgtctacgatctcacaggttcccatatcttcgttcgtctctccgagtgtaacagaacgcttctccagcttgtcattatctcctgctacccatacatatggatgatctgaatctgcgtctacaatgtagtcacgcatcagccacatcttgtctgcttccaatgaagtacttgtctcgatatagacatgctgtccgagcatcaatccatccactgtatccaatgtgacatagaatggatactttgttgcctgattatcgctgttctcagaaccataactcatagaatcctgggaactgttctccggcttctctgtgtctacgttatctactgtacctgtccagatctcatcttcattcactctggagcggatcgtcacctgtgtgcccggtgtcagatctccgatgttctgctcgctgatctttcctttgattctgtattttcctgtagaaaggatactcataaacggtttggactctcctgtagaaggatctgttccctgctgttcgttgatctcctgtacaattccggcaactgtagaagttactgtagactgttccaggctcttctgtgtacggtttacttccagctcttttactttataattgtactcttcctgcttgatctccatctgaagttcctggatctgtgtcgtataggacagctgttcgctggccggcgcactcttcttctccgttgtaagtgtcgcgatctgtgaattcaggctgctgatgttgttcgtgatcttctcaagctccagttttccctgatctaatgtcatggcaagctcttctgtatcgtattcaaacaactttgttccaggctctacttcctgccctttttcaacaaagatctgttttaccttctggttgtctgccagtgtcagtttcaacgtatcctgtgcttcaaccactcctgtaaaacggttctgtgtcccaagtcctgtccctgtgatcattccgacggaatccgcataaagaacattctctccatctgctccacctccacctgtcagattcttcacaagaatcagggcgatcactgccacaaggaagatacctccgccgatcaacattccttttttctgttttgtatccaatcttcttttttctttcggctgactggagctctgtgtgtcggatgactgctttctgattccccgcatcttttgccctcctgctttgttttatttttacttctttttgtgcaaaagataaaatctccgggacatccggtacaatctgcacaaaatattctctcataccatcagtatacaagaaatgtgcctaaaaagacattgatattttcttaagattttttatcttttttctataaccggctcacagactccttctgccccggcaagcagaatcatcagaagcaaatctctctgtggtccaagccatgcttcttttggctcgtaccattcctgaagggtatggattccgtcttcttctccacctcttccaacagtgattgccgggattcccatactgatcgggatattcgcatccgtactgctctcataccgatactccggttcaatccccagcagttctgccgcccggaatgctgctttcacgattgcacagtcctttggctgtgcccccgccggtctcacaccgcgtccttcgatctgcactttgatctgcggctttgaagcatcccatcttgcattttcttctttcactgccagttcgatcactttatgaagttcttcatccagtcggtccaattcgtcttcgctgtccgaacggaggtctaccagcatggatgcagaacctgaaattgtatttacagaagttcctccctggatcacgcctacgttaaatgtcgtcttcggctcatccggaacctggaattctgcgatctgtgcgatggctcgtcccattgcatggattggattaggaatgccaaagttctggaaactgtgaccacctcttccggtaaatgccacctcataacggtgacttcctgttgccgtatagatcaccccgcccgtatactggttatcaatcgagacaaatgcatctacctctggacattcttctgaagctttgttgtcgtatccgaacagatacttcacgccccttagatctccaagtccctcttcgcacacatttgcacagaagatcaagtccccttttgtgtgaagatctgcatggatcattgctttcgctactgcgatcatctccgccactgcatgtgtgtcatcgttaataccgggacaataataacgatttccttcttttcttatcgtcagatctgtcccttccgggaatactgtgtctgtgtgcgctgcaagcattacacttggtccttcaccggttcccggccagatcccaagcacatttccaacagcgtcaatcctgacatccctaagcccgatctcccggaaccgctcccggatatactccgcttttttctcttcgttataagaaggtgccgggatctgacacatattgagcgtgtcctgagtcgttgccggatcttcttcctttatatattccaatgcctgttttatttttttattttcaagaatcattttcctgtttcccttcgttctttctactttgtgtttataatatgaatatgaagttcctccacttgctgtaataaacacttttagtatatcatattttcttaatgataccgtgattttgcggattttctataacagtaatttttttattgaactttttcatttatcgtggtatactctgactaaagttttgaactttcaaattgaactttttagagattttcgtattgaagcagattttaaattgaactttatattttgttaatactttattaatggggtctgaccaccggaaggatgcccctagaaaggagctttatggaaacctttgcagacagattaaaagccgctatgaacgagcaaggcctgaagcaggttgatcttgttcgtcttgcccagcagaaagggatcaagcttgggaaaagtcatgtcagccagtatgtcagtgggaagacaatcccgcgtaccgacatcttacattttctggcagatgccctgcaggttgatcctgactggttaagcaataataatgataatgattccacactgtcagatgttgataagatacagacatccgcagataattcaggaggtatgaaagtgagagaattcaaaaaatcatccaagttaaataatgtattatatgatgtgagaggtccggttgttgatgaggctgccagaatggaagagatgggaactcatgtattgaagcttaatatcggaaatccggctccgttcggcttccgtacaccggatgaggtgatctatgacatgagccgtcagctttctgactgtgaaggttactctgcttctgccggtctgttctctgcgcgaaaagcgatcatgcagtatgcccagttaaagcacctgccgaatgtaacgatgaacgatatttacacaggaaatggtgtcagtgagctgatcaatcttaccatgtctgctcttttggatacaggagatgagattcttatcccgtctccggattatccgctctggacagcttgtgctacacttgccggtggaaagcctgtgcattatatctgtgatgagcagtctgactggtatccggatatcgaggatatgcgtaagaagatcaacgagcgtacaaaagcgattgttatcatcaatccaaacaatccgaccggtgctctttatccgaaggaagtactgcagcagattgtagatctcgcaagagagcaccagctgatcattttctctgatgaaatttatgaccgccttgttatggatggaaaagagcatgtttctattgcttctctcgcaccggatctgttctgcgtgacattcagtggactgtccaagtcccatatgatcgccggattccgtatcggatggatgatcttaagtggaaataaaaatattgcaagagactatatcgaaggaatcaagatgctttccaacatgcgtctttgctctaacgttccggcacagtcgattgtgcagacagctctcggcggacatcagagtgtaaatgattatattgttccgggtggacgtatttacgagcagcgtgaatatgtttacaatgctctgacggatattccgggaatcagcgcagtaaaaccgcaggctgcattttatatgttcccgaagattgatacgaagaagttcaatattgtgaatgatgagaaatttgctcttgatctgcttcgtgaaaagaagatcctgattgttcagggaagcggattcaactggcatcagccggatcatttccgcgttgtttatctgccgcgtattgaagtactgaaagaggcggttggtaaaatcggggagttcctgcagtactatagacagtaggaattcaaaaaatgagctttggaaagccaaaactttccagagctcatttttttcagggcaaatcccaactttatccaagcagttctcttaccatctctgcatcaaattcaactttctccacatggttcacctcaatctgatacagtgcatttgctgcgatgtgttctgctgcctgttccagatctcggattcctgatgtattggagtacagttcaatcacttcattgagtgcctcatctgtcataatgcactcttctgccttcaggctcatgcgtttcagcaccttcggaagtgcgaatttggagaagattactttcttctcttctggtgtataatccgggatatcaatgacagcgaaacgggacatgagcggtgcactgatctgatccttgtcattcgctgtagcgattggatatacaccaacggtagggatcatacactccatgtaattgtctgtaaatccaaggttgtccagcagtgtaagtaaaacatctgccgggtttccgtttccctttccggatgccgccttatccagctcattaataatgaataccagattggattcccctgccatggagaatgcttccatgataatacctggctttgcgttcgaatagattcttgaacttcctgtcagctgttccggatcgttaatggaactcatatccagtgttgtccaaggaagtttaaggattcttgcaacggcataagcaatctgggatttacctgttccggccggtccgacaagcagaagtccgtacgccggaagtgtgtgtgtacggttgatctgaatgatcgtctctatgattctctgctttactttctccattccatacagctcttcatccagaattcttctcgcttcatccggatcgattgcttcaaagtaattgctcttccactgaatattcatcatgatagaaagtgctctctgtgcgtgacggcgctcttcctgagagacctcgtgagaacgtgcaactgcaagatttcttcttgcccacagacgaatgttatccggaagtgtacgtcctgcgcatgtcataaagtctgtaatactctgaatacttgtaagcttcatgtcatctccggactcttcctgctcgtcatcattgatctcttcttttggcgcatcacttgcaaacagccgctcgatcataaactgaaggaagccgtcctcagcagataattttgttccgcctccaaatgcgatctcacggattctgtaaacggcataaccattcggcttattttctccggaaagacgtacattaatgtgattttctccaagccattttaaaaggctgacaaaacgtgcatccactttcaggatatctgcactgcacgttccgtccttttcatcaaactcaaatgcggtctgcttattctgattggtaaacacaccgcaggaatgatgattccacttccggttctgattatccagaacaagaatcggacactccggtgtcgcatggtcttcgttggaacaaaatgttgtataagtacactgaacttctttcttgtcttccggtgcactgttaaagtcaaatactggcatactttcatctcctcatgttttgttttcagaaacattactattctaccacaaactttttgaaagaaaaaggaagaatattatgcatcttccgggtttatttctatcgaatatcttaagatatcctaaaacttggctacatttcttgtaacttgtatctttttatgctacgatacttttcagaaggatcttgtcaacttctgacatttttcgaactaattcatgcaaaggagaatcttctatgaaaatctgtccaaaatgtaattcactctgcgaagacagtgcttctttctgtcaggaatgtggtgctccgcttcccactcctaatgataatgctcatacacaggagaatcaaacgcagcaggaaagccagttccagcagaatgcatattaccagaatgcataccagaacaactataatcagaacaattattaccggaacggggcaactgcaggcattatgccacgtaatcttgtacttgcaattgttttttcttttctcacctgcggcatctacagtatctactggatgatcaagctgaatgatgaggtgaatcagctggccggagagccacaggcaacaagcggaggcatggtattcctattttctttgatcacctgtggaatctatggtatttactgggcttataagatgggagaacgctgtgaccgcatcagaggaatacaggggaattcttctattctctacctggttctctcgattttaggattagatattgtatatttctgcttattgcaggatatgatcaacaaagaggtatcttaatgcaaagaggatacatagaaattcttgtcacatacaagttttctatgtatcctctttcttctatctttctattgcattagacatggaaacatccaccgccaataaattctctcaaaagtgaattcgttggcacattgtcatttccgattcctacgaaataatccaggaatttcaacaaccgctttgcttcaacatattccggagagtctttgcttacgccaagaagcaacggctctacatactgtttcaacactgccagttcatagatcagggaagagttaaacatcacatctgcatattcctgatatgggaaaatattcttctcttctcctcttctcactgacggccacattgagatggtcttcgtcgccgatgcccctcttgttcttgcatccctgacaagtcttcggatcaaacgtccgtctgtagacggaatccggttatgctcatcaatattcagctgtgttaatgcactgatatagatcctgaatttccggtcatcacataactgttctgtcagcttcggattcaggcaatggattccttcgattacaaggatatcattttcaccgagtttctttggctttgtttcaaaattccgcttaccgctcttaaagtcaaaaaccggaagatagacttcctcgcctgccagcagattgctcatgtcctcattgaacttttccacatcgattgcttcaatgcattcgaagttataatttccatcctcgtctttcggtgttttctcccgatccacgaaataattatctacagaaatcggatgtggatgaagcccgttcactctgagctgaatggataagcgatgtgaaaatgttgtcttaccggaagaagaaggtcctgcgatcagaacaaactttacccccggacgatctgcgatctgctttgcgatctctccgatcttgcgctcctggaatgcctcctggacaagaacaatctctcgcatatcatcctgcgtgatcatgtcattgagcgcaccgacggtatcaatcccctgctggtctccccatctcacagactcactgagtacacgaaacagcttatcctttggcacaaataaaggcactttctccggttcgtctttcagcggcatctgaagtacgattccgccctgatacagatacaatgcaaaatacttcaaatctcctgtatccggcatcatataaccataataatagtcacggaattcattcatggcatacaggttcacgtgggaacttctccgataccgaaacaggcgttctttatcaaacattccatatcgatggaataattccactgcctcttctgtatgaatcaactcttttgtgatcggaagtctctgctgtacaagttcatacatgcgttcttcaactttccattggaattccattcccacatgatcgattccttccaccgtacagtaaaatcctgcacctaacgaaaaatgaatccgtacacgcacctgttgcggacgctcatggccaatcacatcgtgtactgccttaataaaaagaaagcagacacttctccgatacgtgtcataccccgccgtatcctgtgttgtaataaatcgcagcgtacagtctccggaaacctgttttctaagttcttgcagacgatgtccatccagcatcacaagtgcgatctgatgtttatactctttctgaaaatccttcgcgatctcctgataagacgtccccttctcataaagatactcttttccgcttatcgtaaccttacatttctgactttccaactctcagccacctccactgtctttgtaaactgcttcccgttcacaactgccctgctgaacattattatgcgttcacttctgattatatgatctggaacggatgctcgattggatctgtaagtacatccagcaccggaagcttcttctcgaagaactgcttcatatcttcaataaaaatatattctgtgccataatgtcctgcatcaattactgcaagcccctgctctactgcatcaattccatcatgatgaccgatatctcctgttacaagaacatctgcccccttctcgagagcaactgcaatcgagctctttcctgatcccggagaaattgcaagacgatgtaccttcttctgcatatctccaaatactttcagacttccaagttcaagtctgtgtttcacgtagacacagcactcttccaatgtcatatctttctccagattaccgattcttccgattccttccagattcccttcttcatctgtataggtaacatctaacacttccccattctgaagatccatgatctttccggacagttctgccataccaagcacatcataattcgtatgcattgcataataggaaatgtcattctggatcagcttcacaattcttcttgtaataaaatcttcatccgtcactttctttactgctgagaataaaagcgggtgatgtgtgatcagcatgtccgcgccttccttgattgcacggtcgatcacaacatctgttgcatccagtgccagataaattctggacacctctttctctgaacgtcctgcaagcagtcctacattgtcaaatcccaaagctgctgttcgcggaaatgttgcctctattacctgtataatctctttacactgcataatatttcatccctttctctgcttctacaagttcctgttccaattcttcttttctctgacggatccggtcagaatctttcgctttcaatccttctaaaatactttgataaatgcgtatctctctttccagatactctctgagtaccggatgttgtttctccagcaaaagctttccatattttaactgaaccgtatcccagcactttacttctgtatcttcgcctgctgtatcagctaccggtggtcttaccttcatcataggataatattttccatcttcacagaccatgtcttcttccagaaattcatatcccttctcaagaagaaatgcccgcactttctcaatctctgactgtggctgaaggatacactcctcgagctttcgcaccacttcctctccttctgtcaggatccggatcacaagtccgccgcccattcctgcgatgaccgcagactggacttctcccggctgtaatgcctgaaatccattggaaagtctcgtctctatctctgcttcaagtccattctcgcggatatgttcctctgctcgctgcagtggtccttcattgacatcaagtgcaactgcttctgtaatcttcttctgctgtgtcagataaatcggaatatatgcatgatccgttccaatgtccgctaatttataatgggcggtcacaagatctgcgaccgcctgtaatcttttcgataattccatcattaatccagataatccctcagttttctgcttctgcttgggtgacggagcttacggagtgctttcgcctcgatctgacggatacgctctcttgttacatcaaactctcgtccaacctcttcaagtgtacgtgctcttccgtcattcattccgaaacgaagacggaggactttctgctctctctctgtcaatgtatccagtacttcatccagctgctctttcagaagtgtctgtgcagctgcctctgccggaaccggtacattatcatcctggataaagtctccaaggtggctgtcttcctcttcaccgatcggtgtctcaagagaaaccggttcctgtgaaatcttcaggatctcacgtacacgttctaccggcatatccatctccttggcaatctcttccggaagcggttctcttcccagttcctgaagaagctgtctggatacacggatcagcttgttaatcgtctcaaccatatgaaccgggatacggattgttcttgcctgatctgcaatcgctcttgtgatcgcctgacgaatccaccatgtagcataagtactgaacttatatcccttgtgataatcaaacttttcaactgctttgatcagaccgaggttaccctcctggatcagatcaaggaataacatgcctcttccaacatatctctttgcaatgctgactacaagtcttaagttcgcttctgcaagctctttcttggcttcctcgtcgccttcttccattctctgtgcaagctcaatctcacgttctgcactcagaagaggtaccttaccgatctcttttaaatacatacggaccggatcttcaatactcacgccttccggaactgacaggtcgatattctccatatccacgtcgtcttcctctgatatgataatgtcatccagatctacatccacctcatccggtgtatctccgctaatgcgcagcacatcaatgttatttgcctcaaggtaatcaaataccttctccatctgatctgcgttgagttccatatcattgaaaaaatcattgatctcctggacatccagtatgctctttttctttttaccaagtgcaaccaggtctttcaatctatcaagaaatttctgtgtaatatcgtccatgtgttcttccttccttcgctgcgcgcatccgcagcctgtcttgttttattttatccttattgaattgtaatattcaaattcttcaggttctccagcttccgtttttcttccatcaaatgctgtaacccccgcatatctgtcgggtcgagattcattgtctgatgctcaatgctataactcttcacccgcaggatcgtctcctgtaaagcctgttctctctcttcctttgtcctcagctctttgattcttgtattaaacaaagaggctgcttctctgtgatcttcttcctctgtgaaatgattcagtatcttcgcaggattcaaggctccctgctttctctgctcatataaaagttctgcaaccgtccgatacagactttctgtaaaatcacccgggcttatgtactgactgatctgatcaaagagcctgtcatcatcgatcatccaggtcaacaatgctttctgtgaagtaaggattccgtcttccttttgcttcttttcagatccctctgcccgtttcggtcttgcgaccggtctcgccattccggcattcacagccatctttgcgaccatcttctccaggctttcccggctgacccggtatgctgttgcaacagcttcgatatagttgttacgctccagctcatcttcgaattcaagcagtctcctcgacacttccctgaagaaatctgtcttgccttccggagaattcatatcatattgtttctccagcatctccaggctgaacatgaatccattacgcgccgcatggatccgcttctcatattcttctgctccaaggttcttaatgaattcatccggatctttatatggatccatccttacaactttagcagaaatcccggcctcccgcaaaatcggcactgcgcgaagcgctgctcttgtaccggcttcatcactgtcataagtcagataaacttcctggacataacgcttgatcagagctgcatgtcctgctgtcaatgcagtccccaatgaagctaccgcattcgtaaatccggactgatggagagagatcacatccatatatccttcgcaaagaagaaagtatggctttcttgatgttctggcacggttcagaccataaagattccggctcttatcaaaaacgactgtctccggtgaattcagatatttcggtttcccatctcccatcacacgaccaccaaatccgatcacacggttattgacatccataattggaaacatcacacgattccaaaacttgtcgtacacaccctgacgttcatccgtgttgatcagtccggcctgtcgaatcagatcttcactgtatcccttctctctcagatatttatacagatcatcactgtatttgttcgaaaatcccagtccaaacgctgtgatcgtctcatctgagagttcacggttcttaagataactgtaggcctgacttccacgctctgatttcagctgtacgtagaaatactttgcagccagcttattcatctcaagaatcgtagactttaaatctgctttttccttcgcttctttcgagtattccatctccggaagttcgattcctgctctgtccgcaagaaacttcactgcttctacaaaagaaaaattctcatattccataagaaatgtaaaaacattccctcccgccccacatccaaagcagtaatacatctgcttctgtctgctcacagaaaaagacggtgatttctcattatggaacggacatagtccaaaataagagctgcctttcttctgcagccggacatatccggaaatcacatctacaatatcattccttgatcttacttcttctatcagttcttctgagtagtacatgaatgcctccgcttaatgtttaaagaatactctattatatatattcgacaaaactcttctctttcctttttatttttttaattttcttctttttttcttttccaatattattttccaagcagaacggttttatatattaggaaaggactttcctaatatataaaaaaaccaagaatactttgttctgtactcttggtcttatcttactgcggaagatgggacttgaacccacacgatcgcattgatcacaagatccttagtcttgctcgtctgccagttccgacacttccgcattctgaaatattttttgaaatgatgcggaagatgggacttgaacccacacgatcgcattgatcacaagatccttagtcttgctcgtctgccagttccgacacttccgcatttctaaaatatttttttgaaaatgatgcggaagatgggacttgaacccacacgatcgcattgatcacaagatccttagtcttgctcgtctgccagttccgacacttccgcatatcatcattttactgtggtcatctgcgttaccgccttgccacaacgactataatacacgttgcggcattaaatgtcaacagtttttttaatttttttaaaaatttattttttatatacaattaatacaataagaaaacccggtcttccgaagaaaaccgggcgaaaatacaagctcaaattaagcaagtttctcttttgctactgctgcgagtgctgcgaatccttctctgtcgcttactgcaagctctgcaagcatctttctgttcatgtcaacgttagccagtttaagaccatacatgaatttgctgtaagaaagtccattcattcttgcagctgcgttaatacgagcgatccaaagctgtctcatctgacgcttacgctgttttcttcctgcgtaagaagatgtgagtgctctcattacagactgttttgcaactctgtactgtttggaacgagctcctctgtatcctttagccagtttcagtgttctgttatgtttcttcttagcgttcattccgcctttgattcttgccatttcctaatctcctccttaatctacttccaaatcttacagatatggtaaaaccttcttcatgttctttacatttgttgcatctgtaatagttgcctgtctcagatttctctttctctttgtagacttctttgttaagatatggctcttgtaagctttatttcttttcagctttcctgtacctgttactttgaagcgctttgctgccgctctatttgttttgatttttggcatgataatttcctcctttattgtgctgccttacaggatcttcatcccggatcatattgtcttaacgtttttcagctaaaaccatactcatatttctgccttccagttttgctgccttttctactgtagcaacatcttccagctgctttgcaaaatcatcaaggatatgcttgctctgctgtacgtgagccatctcacgacctctgaaacgcagtgtcaccttaaccttatttcccttggaaatgaacttcttagcattgttcactttggtattcaggtcattcgtatcaatgttcggtgataaacgcacttctttgatttcaacagttttctgtttcttcttggcttctttctctttacgagtctgctcgtatttgtacttgccatagtcaatgatcttacataccggtggctttgctcccggtgcaatcttcaccagatcaagctctgcttcctgtgcaagcttcattgcatctctggatgacatgatgcctaactgttccccatccgcgctgatcaatcttacttctttatctctgatctgctcgttaatcattaaatcgctaattgtcgtatacctccgtcaaatgaatttcctttaggttcttacgcgaaaacacaaaaaaacgagtgaatatcatatccacccgacaaatgtaataactccaacaggagctccttattatcgatatcggaccatcagtcactcaattgtgctgcggtgagagtggatactctactttgttttttgcttaacgcaacatctaatttaccatatccactctttcctgtcaacactttaaatgcattttcttttgttttttatttttttcgaaatttatctttcatttcccatgcaaaatacggcaacaacacccggtcctgtatgacttccgatcactgttccgatattattgatcagaatattctctattcccatcttctctctgacacgtccggcaacatactctgcatctttcaggcaatctccgtgcgtgatcattatgatctcattctcccagcctttcgactgttctactgccatatcaacaattttattcagagacttcttgcggcctcgttctttcgcaatcacctgaagttttccattgttatccatatgtatgatcggtttcacttgcacgagtgtccccaaaactgctgccgctttggaaatacgtccacctctctgcagatgattcagatcatccaccgtaacattatggcaaacgtgaagcttgttctcttctgcccactttgcgatctcatcaatcgtcttgccttcttctttcaacttaagagcatagtacaaaagcaagccctctcccaggcaggcgcaaagtgtatcgatcacgataatctttgcttccggataatcctccgccagttcttccgccgcgattcgcatactattgcatgttccgcttaatccggaagagaatccaagatgaagtacatcttttccttccttcacaaacggttcaagcatctcgcgtgcttcctccggattgatctgagaagtcaccgacatatggccttctcttaatttctggaagaactctttcgctgtcaatcctgacatatctgtgtaattctctccatcaatcgtatatttcaacggaaggaccggaacatgtctctcttccagccattccttcggtaagtctacagtactgttcacggtaataatgaactctctcatgtcaataacctcctgctctctttcttccggaaaccaccactacattccatatagcagacatgtattttccggataagcaatattttttatatcataccaccttttataataaagagcaaagatattttaacaaaattaagattttgtcagttaagttttatatttagataatttcttcctgaaagtgttttattaaacacgaggaaacataataccaaaatacatcccgtaacaaatccatacagattaaacgctgcagtcagtacaagaagcattagtctcataaatttcaatgcatatccaagttcgaaattcggctgtgtataatttgccactgccacaaatgccatatatagcattacttctgaattgaaccaaccggattctaccgaaaattctcccatcacaataccggcgatcacactcagtggagtactgagcatcgttggcgtattcatcgcagccagccgtaaaccgtcaattgacagttcaagcagaagaaactgccagatcaatggaagattgatctgatcacgcaccattacaaatgaaaaaacgtccggtagccactgcggattctgcatatataataaatacaatggtgtaaaaaacaccgttgcgattgtgatcagggttctggaaatcttcagatacattccggtcaatgtcggaaaataataatcatttgcctcttctatcatatccaaaacggacgttggaagtatcattgccgacggcgagttatccaccagaatcacaacctttccttccaaaagacaggctgctgccgtatccggtctctctgtaaatttgaactttgggaaaggattgaaccattttctcttgaaaagtgcttctgcaagactctgctgattcattctcaggtcatctacctcaagtttctcaatccttgattttatattgtttaaaagttcttcatctacacggtctgacatataacagactgctatgtccgttctggaactctgacctgcttctgtcatttccataatcagatgtggatctctgatccttctacgcatcagtgccgtattgaatacaattgtctctacaaaaccatctctggaaccacgaagcgatttatctttatccggctcgtctacaccgcgggcaggataacttctgcagtccatacacagtgctgcatcataaccctctacaaaaaacaccgctgtaccggagagtacatttctcagaatatcatcaaaacatttcagcacatccacttctacataaggaatcttctgtttcgaaaaagtttccgcatcctgtgggagatcttctgctgtaatagaaagaaaagaatccataatctttaacattgcttcatcttttataaatccatcaatgtagtagaataccgattcttttccaccgatctccatctcccggcggataatgtcaaagcttttctccaccggaagggtctgatccatatattgaatattttctttaaaagaacaactgacttcttttttaatctttctgatcataaaacctaaccctctttttctgcctcttatttgccttggcttcactgagtttaggtttccctttttcttacaaattattctgtcagccttttatttcttttttgttgtacttccaaatccaccatttcttatttctgtcacgtcatcatctaatgtaattccgtactgtacgaagattccctgcatgaatccatctcctgcttctacttctacggtttttccttcattagaatcatttgtgatctttgcaaagatctgtccttcattgtcggaataataataatcgctgtcgataattcctactgtattattcagctgcagtctgtacttgaatcccagaccacttctcggatagcacttcagtacccagtcctgttccatccacacacggactcccgttggaatcttgacggtttctcccggtttcagtgtgattttcaccggtgcaaaaaagtcataccctgcacttccggctgtcgctcttcccggcagttttaaagactcgtagattgcttccatctctttttcttccgctgtctcaaatgtgtctttccacccttcaaagaacttttctttactcactttttcaaatcttgcaattcgattcatctctgttaataacctccaatttattttcacattttgtaactgttcagagccaagcaaaatttcaaaaaagaggtaaaatgcttgcatttttaagactgtttttgaaattttatttggcggatacgccacaccttcaaaatgcgtagcattttgaaggttggctctgaacagttaccacatttttatctgtcttcttgtctcgtatacaggaagtttattctttcctgcccgcaagcactgtaattcattattataaaatacttgaaagtaaaaaacaagttggtgaaataattctcttgagatattctgtgtttagagtataatagattttatagacacgaaacagaaggtgagagtatgcgaacaatggactttactacagaacagccggattgctgctctgtcggtgattatttggagattgtcgaacatgagcttcccacttcctattggtatatgcttgagcatgcctacggtgcaagcacgaatttcaagaaccgggaacgcttgaaggcccgcaaaggcaaagtcattaagatctggaaggacgacagattcaactatatcaccctggaatttgatgaagaggatgtgaaatgatgtacaacaaagatgatgttatatatattcttgagaataacacaacaatccgtaaaggaaagattgcacgcaagcagggggagaactatatcattcagctgatcggctcctgcggcgcactgacaatgccggaagatcagctatttgaatctgaagaagctgctgaaaagagccgacagcagatcaagctgaacagcgcgaatgtacagaatgatttcatatctgtaaagccggatcctttcgacaactggattgggcgataggaattggtctcagagttgttgagaatattcgtaatcggcaacaagatatagaaaaagcactttcggaagaacagtatcttccgaaggtgcttttttgttttttcttatcgttatactaaaactctctaatccaaatctttagaacggtgttccatacagatcatacggtgtcacctgatatacgtaataattcaaccagttcgtatacaggttattgcaatgtgctctccaggtcagcattggtttcttctctggatcatcattcggataataattctccggaatctgtggattcaatcctttccccagatctctcttatactcggaatccagcgtcattctatcatactccggatgtcccattacaaagatctgacgtccatcctgcgccatgcaaagataaactcctgcttcttccgaatctgcaagaattgtaattctgtcatctttttccaatagatcttgcggaacttctgtatgtctggaatgcggtgccagaaacttatcatcaaatcctctgacaatcggaatctttctgttccttacgtggtgccagaacaaacctgaacgtttttccggaagttgtaccttatcaattccataatgataataaataccagcctgtgctccccagcaaaggtgaagtgtagacacaacatttgtctttgtccactccataatacgtttcagttcttcccaataatctacatcttcaaacggcatctgttctacaggtgcgcccgtgataataaatccatcaaactttttatccttgatatcatcaaacgcttcatagaacttataaatgtgacttgttgatgtattctttgacacatgacttgtcactcttacgaaagtaacatccacctgcagcggagagtttgaaagtgctctcaaaatctgaagttctgtatcttccttaagtggcatcagattcagaagtccgatactgatcggacggatatcctgatgtgccgcacgcagctcatccatcacaaagatgttctcttgttccaatatttcttttaccggcaaatcattttgtactcgaatcggcattgtccttatctcccttttcttcttgtatttcttttatctcttcctgtttttctttctgtatataaattccttcggaatctacatatccgttcttcccatagcactctgtatctgttggaagttcttttttcttcaggatagaattaaccagcatatttacaatataataaatcaccgcaaatgtcggtacaccaaaaagcattcccggaataccaaataatccccctgcgatcaggattgagaaaacaacccagaacgaggaaagtcctgtcgaatttcctaaaatctttggtcccagcacatttccatcaaactgctgcaatgcaataacaaaaatgataaaatagagccctttcaatggatctgcaagcagaatcagaattgcactcggaattgctccgatatacggtccaaagaatggaattacatttgtcactcctacgatcacgctgaccagcattgtatatggcatattcagaattgataatcctataaaacagattactccgataatcagagaatcaataatctttccgataataaatccaccgaagatttcattactttttccgccaatctgaagaatcatgttggcctgtcccggacgaaatacagcgtagatcagcttctttgtctgtctctggaacttctctttgctaaacaaaacataaatagagacaatgattccaataataaaattaaagacttcacgaaccatctgaatcattcccacagtaagctgtgtcatccacagattcactttctccatcaaatctgtcttcatccagttctgaacaaaatcacttgcttcttcaactatgctcgccaacatctttccaactgttgaatcagaagaatgcatcttactgaattcatggataaaccggttcatctgactcggcacagtgaaaatcatgtcgcggatacttccatataactccggaatcatcatattgagaagtgtagtaatcaatgccaacattaagatgacagatacgaagattccaactcctcttgatatctgttttttcttctttaatttgggacaatgtttctccaaaagcggaatcatccgacggtctatccacttcacaatcggattcagcaaatatgcaattgccagtccataaataataggttttgccactgttaaaaactgcttaaatacagatgaaatctgtcccaatctcaaaagtgcaaaataaaataagatacatgtcgcaactacgaagaacaacgtcatactttttatggcctgttctttgaagctataccttcttttttcatgctcttcccacgaattgtgcctataactttgatctgtatgagtctttgacgcctctttcgctgtcgtatgctcatcctgtcgatattcactcatgtacgatcatttcctttcttctgttaaatatacatattacgattataacgcggttgcaataatagagtcaacagtagaaaaaagagattcagaagatcctctcttccaaatctctttctattatcacgattttatacttttatctgatactcaattacagcaacaatcaaatgttgcacattctgtcccactgctgtggcaggcgtcaccgccttctacactgattttccctgcgtgacatttgcactcttcattatatctgcaatctttcgcctggcagtcaacgtctgagcaatctgaaacagacttcatcgaatccgtcttattgctataacttccctctcttctttcttcaaagctatcgcaacaggtctccttcgcattcttcgcactgtttcctcccacctggatcttatccagttcgcaaagatactgataattgtgtacacatgtctgtacggtacagcttaattctggcatactgatttcctcctcttaatcttattagaacaatatcagtatgtccctttcttttaaatatatacacttatatccaaaaacacaaaacggtatgtatctctcaatacataccgccagtaatctgattcttatgcgttctttccacagcagaatttatatttctttccacttccgcacggacatggatcatttcttccgatctttttcgccttgcgaactgtaccggactgtttctgctcgcggtacagacgtttctttgtctctgcatcaaagatcttatcccactgtgggagtccatacagccagtcagcttttgcatcgatcatgttcttgtaaagaagttctttatcaaatgcaagacttacaactgtatcttcttccattgtctcgatcgggtttgctgtctttagactgtcattgattccgtcaaggaatccaaccattgtcatgacatcctgtccatatttctcagcaagctctttcactgttcccttcacttcttcatccgggttctcgagcagctgctcgtaaatctctctttcgattgtaaagtatgttccccagaacttttccaactgatctttcggaagattacggtcataggccatatcacgccactggtctaataaacatttctcactcattgtatattgctcctttatctttaaacttcgaattcaatcgcctttttattatataacaaattttatttgccgtaaacaattatttgatatatactgttactattactatattggcgtatgaaaggactggtcacatgaaaaaactgaaacgtatttctgcactgttaggggtttttattcttatcgcaatgtatttgtgcacgctgatttttgcactgattgattcacctgttgcttctgatcttctcaaagcatctatcgctgcaaccattttcgttcctgttattctctatggactgttgctggtcacacgactgttgaaagatgattcaaaagacaattctgatcataaataaaatactgcagtcagtaatgcactgacagaatcaactccccgggcgacatgcgaagctgtttcccgggtttttactgcctgtctcctcttcagatattcttccatggataaattttctctgtctttttcattgctgttctgttccatcgaattcctccttcttttttctcagctatatattatgatgttgggggcaaaagcccccaactatgatacctacggattgtttcgtgcaatgcactcccacaatcctacccactattcgcatatcgtgaagcttccgctccacttttatgctcatattgggcgggtcccaaggccattacaccacctttgtgcaagcaccggtggtttcagaccttttgaccctggtatcatcatattatatgaggaactttctgatttattactatctttttgttttccgtgcagatcccacgcggagcaacaactacattgtacgccgcagtgcgcatcctaatatataaaaaatacaggacggtaagctttcacttcctgtcctgtatttctgcttcattatttattacgataaataatatcgtctcttcctggtccgttactgatcattgtgatcggatactcgatctctttctcaatgaattcaatgtatttacggcagttttccggaagatcttcgtagtttttgattccacgaatgtcttctttccatcccggaagaactttgtaaaccggttttgccttctcaagaagatgtgttaccgggaattctttagtaacttctccgttgatctcataaccaacacataccggaatctcatccagatatccaagtacatcgagtactgtaaatgctacatctgttgttccctgcattctgcagccatatttggatgcaacacagtcaaaccatcccattcttcttggacgtcctgttgtagcgccgaactctccgccgtcaccaccacgtcttctaagctcgtctgcttcctctccaaagatctcgcttacgaaagctccggctcctactgcacttgagtatgctttacatactgtaacgatctgcttgatctcgtatggtgggattcctgctccgaccgcaccgtatcctgcaagtgttgaggaagatgtaaccattggataaattccgtgatccggatctttcatggatcctaactgtccttcaagaagaactgtctttccttctttgattgcctcgtgaagataaagagatacattagctacaaacggctctaccattttcttatattccatcagttcgttatataactcatcaggattaatcagtggtttgtggtataaatgctcaagcagtacattcttctgccctgccacgcgcacaaccttctccttcaaaagttcatcatcaaacagctcactaacctgaaaaccgatctttgcatacttatctgaatagaacggagcaattcctgactttgtggaaccgaaagattttcctccgagtctctcttcttcatatgcgtcaaaattcttgtgataagacattaccatctgtgctctgtcggatacaagaatcttcggcatcggaacacctttttctactatagactgtacctctgcgaaaagacgcggcacatccagtgcgacaccattaccaatgatgctggtcgtatgtccatagaacacacctgatggcagtgtatgcagcgcaaattttccgtaatcattcacaattgtatggcctgcattcgcaccaccctgaaaacgaacgatgatatctgcctctctggcgagcatgtctgtgatcttaccctttccttcatcgccccagtttgcaccaactactgcttttaccatttcaaaccctcctgcgtatgtttgcttgtaaataatattaatcagcggtacttataaccattaccgccttaaaaattatactatacttttgcagggttgtaaaacgttatttcgcatttttttatttaaatgtcagaaatattgtatttctgcgataaaagtattacaatagaaagtaaatcaggcggttttcccctgagagcaaactgtttatcagtatcaaatttagtttaatagaagggagactatagaattgaaaaaattaatcaaatggatagttggacttggcactgttggtactgcaatcggacttcttgctgttcgtctgatcaaaaaatcaaaaagtacatcctctgatataaaagcagatagcaccgatagcaataaagaagaaacggattccgatacatttgatttggatcaggatcttgaaccaacacaggaaagatcttatgtatctttgcaggcagcccgaccagatgatttaactgaaaaatctgatgttgacagcgctgactcttctgaagcagaaacacaaccagcagtttctgatgaatcagatgatacgattgctgaaaacgaataataaaaaagaaagcggatggttcaatcttacacttaataaaattgaacgatccgcttctcttttttattaaaatacagcctgttcttctatcatctatttccatgccttacagagtagttgaactgctgcacggattctctcctcattcatgtttgcataacctaacagaatcaccgcttttcctgtactgtcttcattatcttttacacaatactctgataagccataaactctgacaccttgtttcgccgctttttcaatcaaatccttttcggaatcatccgtcttaaaatgcagcaacaggtgaacacctgcattttctccggaaatttccagaatctctttcatcttccgaaggctactgatcagaacatcatgcctgttcttatataatgcgcgtgttttattcagatgtcgctcataatagccttcttccataaatttctgaagaatcatctgatccaccttggagacagtagaactgatgaatctgcatttttcctgataaattttcaaaatatgttccggaagcaccatatagctcattcgaatagaaggtgccagtgatttagaaaaggtacctgtataaatcactttcccattgctatcacttccctgcagtgccggaatcggctttcctttatatcgaaattcactatcgtaatcatcttcaataatatatctgccttctgccccatctgcccatttcaaaagttccattcttctttgtatcggcataacacatccaagtggatattgatgagacggcatgacaaatgcaatatccgcccctgatttctctaattcatcaatccgcatcccgctttgatccatatcaacagtacagactttatagcttaatcgttcaaacaaacgataggcctgtccataggttgggttttccagcgcaactttatgacaatttccaatcactgtcgttaaaagcataagcagataatcacttcctgctccaataatgatctgatccggatgacagtgtattcctcttgcctgatgcaaataactgctgattacattccgaagcccatattccccttgaggattccccaatcggaacatctctgccttatcatctatcaggcattctttggataattttctccagacattatacggaaaactgttgagatccacaccgttcggagtgaaatcatacgaatattctgtcactcctgaagaaatcggttcaactttgatctccggtctcttctgaagctgatatatgccttcgatctttgcgacaaaatatcctttgcatgggattgcctccacatacccttccgacaggagctgttcatatgcaagttctactgtactcctgctcactaccagatgcttactcaatgctcttgtagatggaagccgctctccactctgtattacgttattctgaatctcttccttgataaattcataaatctgttcgtacagcggagtttttgattttggattcaaactcattgtcaattcatacattcttgttctccctctgcatcacacctacaactatgaaaaactgccgtgaacaatttctcattgtgatcacggcagtccgttttttatttcttcggcagtttgaaagaactcttcagagaaacaatacggttaaataccagattctccggtgtagaatcctttgcatcgatacagaaaaatccgtttcttacaaactggaagctatcataagctttcgcatctgcaaagcttggctccacataagcatctttgataatcttcagagaatttggattcaggttcagagaaccatcctctttattgtatacacccttctcttcatctacaaggttctcatacagtcttacttctgctttctgtgcatatggtgccggaacccaatgaattgttcctttcaccttacgtcctgtaaatccacttccagcctttgtctcaggatcataagtacagtgaacttctgtcacgttaccattctcatcctttacaaagctttcacacttcacaaaatatgcgtgcatcagacgaacttcattccctgggaacaagcggaaatatttctttggcggttcttccatgaagtcgtctctctcgatgtaaagttcacgacagaacggaactttacgctgtccgagttcttcgttctccagattgttcgcaacatccagatattcaacttctccttccggatagttatcaatcacaagcttgatcggatcaagtacagccatcatacgagaacgcttcatcttcagatcttcacggatacagtactcaagcatcgcataatcaacagagctctggctcttggaaataccacacatatcaataaacatcttgattgactccggtgtaaatcctcttcttctgagcgctgcgatagaaaccagtcttggatcatcccagccatcaacaatcttatcttctacgagcttcttaatataacgctttcctgttacaacattcgtaagatacagttttgcgaactcaatctgacgcggtgggttctcgaattcacattcttttacaacccagtcataaagaggtctgtgatcttcaaactcaagtgtacagatggaatgtgtgattccctcgattgcatcctcgatcggatgagcgaaatcatacattggataaatacaccacttatcacctgtattgtgatgtgtcatgcgggcaacacgataaatgatcgggtcacgcatattgatattcggtgatgccatgtcgatctttgcacgaagaactttctctccgtctgcatactttccggcacgcatattctcaaaaagctcaaggttctcctctacagaacgatttctatatggactttcttttcctggttctgtaagtgttcctctatattcacgcatctgttctgctgtaagatcacagacgaatgcttttcctttcttgatcagcttcacagcgcactcatacatctgatcaaaataatcggatgcaaaataaagatgatccttccagtcagcgcccagccacttaatatcctctttgatagactcaacaaattctgtcttctcctttgtcgggttcgtatcatcaaatctcatatggaattcaccattatacttctctgccagtccatagttcaaaaggatagacttcgcatgaccaatatgaaggtatccattcggctccggtgggaaacgggtgcatacatgatcgtaaactccttctgccagatccttatctatctcctgttcaataaaattctttgaaactgtttcgttctccatatcttcctcctactaaccataagtaccatccggatgatctgtcacattccttcggaagtgtgatttatcctacaggctttcatgctcaatatcttatcacataaaaagaacaaccacaagagattctttttccgcttacaatctgccttttaataattcataagcctgtgccagaatagccgcgtgatccactgcaattcctccaccctcttttacaacatagtatttttctctgaccaatcctgtcagctcctttttctgaacaactgcattcattttctgatcctgattttgaattgtcagatgatattccgtcttttcccatccatcttcttcatatactgtctccggttccatctctatctcaaaccacgccgcatctgccgcatcatctccggcctccacacttacatccgactcctttacaatagaaagatacgcacttgtaatgatcctcgctctcggatctctctgataatctccataacaggcaaactgttccaccggaagtccgctgactccggtctcttcctgcagttcccgtcttgctgtatcctccagattctcccgcaaatttacaaatcctcccggaagagcccaacacccaatactgggatgatttcctctcttaaccaaaagcacctttaatcgtccctctttcagtgcctgttcatctttataagagaaaacaactgtgtctgttgtacaacacggatttttatatcgatatggatcatattcttccagaaattcttccagtgtctgtcctttcccattccgttctcctgtcccataaaatggtgtgatgtcttctaaaaacgatgccatatccgttcctccttttcacttctttcaaaacactcccaacatactcatcggttcaaaaaaacgaccgatttctgtcaaaagattcgcaaaataaacacaagttcctgcttctgcctctggatgtgattcttgaaaatcataacactgtactcccacaagcggtgcatgtgctttctcccaatcccgttccaaaatctcatgaatctgttcttcatcctcttcgccaacctgaagaaaaatctcaatgttctgcctcatcgcatcaaaaaaatgataaaattccggcagatattcttccatctcccatacaaactctgtaaacgtctgtaacgcatctttcagttcttttaattcacttgtttcataattcttttcgctcatacggcttccccttctgcagaacccgtcaccttgaaccaccacttcaattaacttcagtataacatattttatgacaagtgaaagaatcttcaacaaggaattgcttttttctttcaagcctgtaagtccataggaaagtctgtaaaattcctacggattggaattttcacaaaagaaaaaccccgaaaacaccgcacttacgggcgtttccggggaaagattcaaagctgtctaggggacttgaacccccgacctccgccttaccaaggcgacgcgctaccgactgcgccaagacagcttattgcgttccagcagaacgcaaaattaaatatacactacttgagtttgattgtcaagttaaagctgatctgaatccagcaaaatggtaaatggcccgtcattgagcagctgaaccttcatatcagctccaaactctccgatctgtacttcatccactgattccctgcatttttcaatgatatattcatacatctcattcgccatatccggttttcctgcttcaataaagcttggtctgtttcctctcttacagtttgcatataacgtaaactgtgaaaccagaagaagacctccgtccacatcagcaagcgaaaggtttgtttttccctgttcatcttcaaaaatacgaagtccgatcatttttcgtatcattttgtctgcaatctcttttgtgtctgtatctgctactccaatcagaacaagatacccttttccaatctttcctgatatctcaccatcaatcgtaacagatgcctctgttactctttgtattacaaatctcatcttctcaaacctctgtttttttattatttgttgtcagacaaatcaacgtcacagcactcactgtcatcggaatactgatcaggataatcattcccattactattgtcggaaggaatctgctctcaagatctacgatcagcgttcccatcagattatagaacatgtgcatcagcatggatgccgccagagtgttatagcgatgcgccacaaatccaagtgcaaaccccaaaagtgccgcataaattccctgtacgagattttgatggaacactccaaacagaaccgcctgtacaacattcgccaggatccaatgcattccggcacgttcaagatatttctggatcaaaccccggaaaatcatttcttccacaagaggtggaagaatcaatgtactgaaaacccacatcagcgaatattctgtcaggccggaattttctatcagattctgataattatccatcgcatccggaagtgaccgtgctacaattgccagtataatactggtcacgtgtatcatgccaaaagtaaacagcgcgattaaaacgcatccgtcccatccgactcttctgcatttgcctgggattgcacggattcctccttcacgtagctgaaaagcaagataataccataaagcaggaataggcagaaccataaggtacaaaattgccgataccagattcaaatgactcatcaggaactcataaaccaccattgttccattgtttcccataaccagaggcccgccaattgcggccagataagaaatgatgtatccgaatttgttaaagcagatcatgatcaccagaaagactgcaagtgccaaaaagtaattgtattttttcttcatccgtatttctcctttacggcagaatcttttgtgcttttgtcttgatcctctgaagtgcattgtccactgacttcggactctttccaagtaattccgcaatcgtccgataatccgttcccatcaagtgcagataaagaacatgattttctaatggactgagcaattctttgagctgctccgcaaaagcttctgtatattcttttccaaaatagagaacttccggatcattctccttcgatgattctatcgtgtcaatcaaaggaagacttctcccctctcctacctgttcactgtcttcatataacgaaacataagaattcaaaggcagatgcttttttcgatttgatgcctcaattgccgagtacatctgtctggagacacaaagttctgcaaaacttgaaaatgatgttttctgcgttacatcaaaatcccgcactgctttgatcagaccgatcattccttcctggatcagatcctcgttctctccacccaacagatacattgcacgcgctttcttccttaccatggatttatatttcaccatcaggtaatccataatctcctgatttccatttttgtaatcacataaaagctgctcatctgtcattctgtcatacttactcatccgattatcacctgttatcactcttttttcgagcaatactcatatttatttctgcgaaatcctctgtcttacgatctcataagcaagaacgcctgctgccacagatgcattcagagaattaatctgacctttcattggaattcctgcaacgaaatcacagttttctttcacaaggcggccaacgccctcaccttcatttccgatcacaagaccgatcggtcctgtcaggttcaggtcatacatctgctcgccatccatatcagcacatacaaaccagagtcctttttccttgagttcttccattgtcttcacaagattcgtcacctttgcgaccggtgtataattcaaagctccggcagatgtcttcgcaactgtcgctgtcagaccaactgctcttctctttggaataatgactccgtgtgcacctgcaaggttcgctgtacgaatgatcgcgccaagattgtgcggatcttcaatattgtctaaaagaatcagaaacggagcttcgcctctctcttctgccagtttaagcatatcgtcaatcgtagaatattcatatgctgccgcatgcgcgatcacgccctgatgcttccctgtctctgagagctgggaaagtctttcttttgtcacaaaattgatcagagatccgtgttttttcgcttcacgtacaattgttcttaccggtccgtcctggcatccgtcaagaacataaatcttgtcaatcgtacgtccggaacgaaatgcttccaatacggcatttcttccttcaattacaaatgtctctgttccctgttctctattttcctgcatgttctgctcctttttcctttatctctttttcaatgctttcaagtccgatacttacaagctctgtcagtcgttcatactgacctgtcagatataaatgtccgatcaatgcctcaaaacctgtcgctcttctgtaatctgtaattgactgattctttgccggagacacagatcgtgcatttcttcctctccggtaaactccatgttcttcctcattcagatgctcctgcatggaacgcatcataaaggactgtgctgatgcctgcacatactggcttgtctcttcatgaagacggtggaccggcctgtttccacggccaaccaccattgtcttaatgatcagatcatacacgcagtctcccacataggcaagaaccagcggagagcactgctttgcatcaatctctttcattccgggaattgtccggatatactcttctaaacctgctgttatgctcttttccattgtaccccttctcttgtatctttcaaaatgatacctttcgcaagaagttcatctctgatttcatctgctcttgcaaaatttttctcttttcttgctgcctgacgctctgcgatcagtgcttcaatgtcagaatcaagaatctcatcttctttatcaacaataattccaagtacttctgtcagtcttaccagacggtcaaacagattctcaagatactctttggaactgtcttcgtctgtcatcgtattaatgaattttacaagatcaaatactgcagcgatcgcatctgctgtattaaagtcatcatccatagcgctctcaaagtttccaacatattctgctgactttgcaaacttctctgcctctgtctctgccatatcttctgtcttcgcgcttcccataaggaatttcagacgatcagctgctgtaatgattctctcaagtccgctctttgctgcttccatcaattcagcactgaagttcagtggacttctgtaatgtgcgcttaacatgaagaaacgaagtacctgaaggtcatacttctcactgatctcacgaactgtgaagaagtttccaagagacttggacatcttacggttatcaatgttcaggaacccgttatgcatccagtatctggagaactcttttccgttcgctgcttcactctgcgcaatttcattttcatgatgtggaaagatcaggtcttccccacctgcatgaatatcgatctgctcaccaagatatttcttggacatctctgaacactcaatgtgccatcccggacgtccctcaccccatggagaaacccatgcaggctcgccttcttttttcggcttccagagaacaaaatccagagaatcttctttctcatcctcaccgcttacaagaagggtacgtccgcctgactgaagatcatcaaggttcttatgggataatttaccataatctttgaactttcttgtacggtaatatacagttccgttcttctcgtatgcgtagcctttctcaatcagtgtctcaatcatgctgatcataccgtcaatctcttctgttgcaagcggattctttgttgccggctcaatattcatgccgtccatatctttcttgcactctgcaatgtaacgctgtgagatttcttctgctgtaacgccttcttcgtttgctttcttaatgatcttgtcatcgacatccgtaaagttagatacataattcacatcataattcttgtattcaaaatatctgcggacagtatcaaacacgatcattggtcttgcatttccaatatggatgtaattatatacagtcggaccgcatacatacatctttacttttccttcctctagaggaacaaactcttcttttctttttgacattgtattataaatcttcatcgttcttactctccttattttctttctccacacatcgcatatattttatcatagattccaaatgtttgtgaagttttatattctcttcctgcagttctcgaatatctgtaagtaccgggtccggtaaatgtacctgatccatatcacttcttgggactttcttgttgtccatgcggacgattcgtcccggcacaccgacaactgtacagttcggtggaacctcttcaagtactacagaaccagctccgatcttagaattttctccgattgtaaaagaacccagaatctttgcgccggcgctcaccataacattatctttcaacgttggatgacgttttccctgttcttttccggtaccgccaagcgtaaccccctgatacagtgttacattatctccgatgatcgtagtttctccgatgatcacacctgttccatgatcgataaaaagtccctttccaattgttgcacccggatggatctcaatccctgtcttacgcgctgctctctgagaaatccagcgtgcccagaaataatgctttttcaggtaaagcttatgcgccactctgtagcttaagattactttaaagcttgggtacaaaaatacttccatgtttgatttgatcgcaggatctcgctctcggatcacctctatctcctgtttgacataagatatcattcccatatttatcattcctttctgattcaagaatgcacttaacaccctaagcggaacgttttttgtatattaggcaatcacttttcgaatatacaaaaaacttcgtctcaatctagagacgaagttctatccgcggttccactctaataaaagaagttatacttctttcactttcacgcacgtaacgtgtgcctgacgtatcctgctactccattcacaggatcgactcccgggggcacttcacagtttcttctctcaaaggtgctttcagccggtgacaccttctctctatgagtccaaatctctgttactcttcccgttctttgtctttctcaattctattaccaatatttattgttttcaacatctctattatcttatgcaaaaaatcattttttgtcaactattatctctgccgatcaactgcattttaacattttattcagacaatctcattcaaaaatattggacagaagttctgaagtttcctcagttcttcctctagttcttctgtaagaattacgctttcctctgcacgtatttcttcaggagttttgtatccaaacaatatttccgtcaatgctgcaatggaaagtactccctgtgaatcttccgtttcagacacgctcaggctttcttctccttttgagctactgagtttccagatcctgctgttcttatgaagaatcggatcgatcaccgcaaaagagcaatggatctcacattctgacgggattttcattttagaaaatagttcctgcaaatgaacgatcctgatcataataagcggtttttctttatatgcagacgtttcatcatctggccagtcaggtgcttccttaagcccataaaccgaaaccttttcttccggttctctaagaccatccaccgacgcccagaagagatcttctttccccttccagataaagtggttcctgatctcgagcccctcttctttcgcatatgcatagatacagaccagcttctcttcttcaaagacaagccgcatcccgccaaactcgctctgttgttcgagaatctgtgtctgataatattgtgcatttcttaaagcaacaacattccagcaatccgaaaaattctcttcaataaatgccgccatcttccctgcatccataaatcttgcatcacggtctacaatccgctcttgtgatatatttctatattcatcatttttatattcttttcttgcagaaaaaaatgcttcatcaagctcgatttgtttctgttcataaacaaatcggaaatcataaggataatagattgcttctgccgccggcatcaggaaggtaaatggcatcttctgcgaatactgatcctgtaatgcatgaatcagaagatttctcatatatcctctgcctctatattctgcctgcgtggcaactcccacgatataatccgatggaacgacactttcctgtaactttacctgataagggttcagctgcagcatcgcacgtatctcatcgtcttcctctattacataaatcgtattgtcttttgtcttgatataatagtaataatcaacaaattcctgactgtcttctgaaaatacctgttcccacaagcccctggttttcccatgctctgattggtccagctttcgaatcttcatcttattttcccgcacagcatccaccacatcctgcaggcttctccatcacatccacgctactgtaattcgtaaatttttcaatcgcacagatcgcctgggatgagattccttcgccgcttccggtaaagccaaggccctcttctgttgtagcctttacattgatctgatcaacgtcaattttaagcgctttcgccatgttttcccgcatctgatcaatatgcggacgcatctttggacgctgcgcaatgatcgttgcatcaatattctctatcacataaccattttcttccaaaagtccgcctacgtgctcaagcagttttatactggatgcacccttatattttggatctgtatccggaaaatgaagaccaatgtctccaagtgctgctgctccaagcagtgcatccattacggcatgcagcataacatctgcatccgaatgtcctaagagacctttctcgtaaggaatctcaactccacccaggatcagttttcttccttcaactaacttatgaacatcatatcccatacctacacgcataattatttctcctcaaaatcattttcagcatcttctgaaacaggttcttcattcagttctgcaaaaatatctaccactcttgtgtctgtcagttcttcttcctgagctggagtttcttcaactggtgttccttcagcttttatttcttcgtccggtgtttcctctgattctgttgtagtcaccggtttttctaccgattctactttttcttctgatactgctttttccgctgcttcgttttctgttgaatctgaatctgctgttttttctatagcttcagccttgctgtcttgcattgttttttcctcggaatctgccttagacactgcgtcttccagcttcttcctgtcttcttctgaaagcattgtcggcattgtattgtctgatactttttcgtcttccgatacttctgtcgttgcgctctctgttacctgtgacatttccttcgccgctgccgcttcttctgcttttcgtttctgctccgcttttctctttgctatcatcttcgcaatctgctttttgatatcaatttcaaacgttttgcagatggcattccctgcataagcaactccaaccaggataaatacaactgccagtactgacataagtgtcatattgctaggacgctgctggatcatctcacttaagattctgatccccaggtaggtaagataacctccaagtactattctgagcgcatatccgcttttcttattcatcttgtttcctccgtatttctgttattggccacgttttaaaatataaacgaaagacaacaacttttttctatatcattatctgttatattaccacaagttgctccttaatactattatttctttgcttgatataagcagtaaccagtaaatttgcgtaaaaaagactgcgtactaatttcttaagcacgcagtcttcgtcatagtagcgggaactggatttgaaccagcgacaccacgggtatgaaccgtgtgctctagccaactgagctatcccgccatatttaattagtatatgggacctacagggctcgaacctgtgaccctctgcttgtaaggcagatgctctcccagctgagctaagatcccatataagtagcgggaactggatttgaaccagcgacaccacgggtatgaaccgtgtgctctagccaactgagctatcccgccatatttaattagatatgggacctacagggctcgaacctgtgaccctctgcttgtaaggcagatgctctcccagctgagctaagatcccatataagtagcgggaactggatttgaaccagcgacaccacgggtatgaaccgtgtgctctagccaactgagctatcccgccatatttaattagatatgggacctacagggctcgaacctgtgaccctctgcttgtaaggcagatgctctcccagctgagctaagatcccatattcatatgtcggctgcggcttccacttatgctttgtcgcaaccgacttgattattatatacttaacacctatcagatgtcaacaacttttttattttattttatattttattgtaactgttcagagccaacctccaaaatgctacgcatttcgtcggtgtacagttaccattttatttaaagtattttacacctgactcgaaaatcttaagatcctgctctccatagatattgatagcaacatgatctccacgtctctctgagtgagccatcttaccaaggacacgtccatccgggcttgtgataccctcgattgcacggtaagatccgttcacgttccactcttcgttcatgctgatatttccttccggatcacagtactgtgttgccacctgtccgttagcgaacagcttatcaagccactcttcgcttgcaacaaatcttccttcaccatgagatgccgggtttgtataaactccgccaagctgtgctccctgaagccatggggatttgtttgtaacaacctttgtataaaccatcttagagatatgacgtccgattgtattgtatgtcagtgtcggagcatcatctgtctgtccaacgatttttccgtatggtacaagtccgagcttgatcagagcctggaatccgttacagataccaagtgcaagtccgtctctctcattcagaagtttttcaacagcttctttgatcttcgcattctggaatgcagttgcaaagaatttagctgaaccatccggctcatcaccggcactgaatccacctgggaacatgatcatctgagactgtccgattgctttctcgaactcgtctactgatccacggatgtcttctgcatcaaggttacggaatacttttgtaataaccttagcacctgctctctcaaatgcacgggcactgtcatactcacagtttgttcctgggaataccgggataaatactgtaggctgtccaatcttatggctgcaaatatggatatcggatgtattgaagagcttctcttcaaccttggcatcagaatctgctgctgattttgtagcaaatactttctcaagtgttcctgtccatgcatcctgtgcgtctgcaagtgcgatcttcacatcgccgtaaacaagtacaggctcttctgttacttcaccgatttctgtataagtaattgcgagttctccaacctttccgtcttcgacctctgcgataatatctccaaatgcaggagcaaacagatctctcttatctacattgtgctcgattttggcacccatgcggttaccaaatgccatcttgctgactgctgccgcaactccatgacgatccagtgcatatgcagatacaatttttccgttctgtacatcttccatgaatttaccgtactgatccattactgcatcgtaaaccggaagatcattctcgtctctttcgatcttgagccatacaagtttgtttcctgccttcttaagctctggtgtaataatatcctgctcaagagccatatcaacagcgaaggatacaagtgtcggaggtacatcgatatcctggaatgttcctgacatactgtcttttcctccgattgacggaagtccgaaaccgatctgtgccgcataagctccaagaagtgctgcaaacggctggctccatctcttcggatcctctgtcattctgcggaaatactcctggaatgtgaagcggatctttctataatctccacctgctgccacaatcttggcaactgactctgtcactgcataaactgctccgtggtatgggctccagcttgacagatatggatcaaatccataactcatcatagaaacactgtctgttgttccgttcagaacaggtactttcgctaccattgcctgtgtctctgtcatctggtattttccaccatgtggcataaatacggaacctgctccgatagaaccgtcgaacatctcaacaagtcctttctgggagcatacattgagatcagagagcatagaaagccatgtctcttttacatctcctacttctttctttacaaaaaggctgtccttcttagaaggaatctcaacctcaacatttgtctcctgatgagcaccgtttgtatcaaggaatgcacgggaaaggttgacaatctcttttcctctccatacaagtacaagtcttggctcctctgttactactgctgcaactgttgcctctaagttttcttccttcgcgtatcccatgaattcatctacatctttcgggtctacaacaactgccattctttcctgagactcagagattgcgatttctgttccgtcaagtcctgcatatttcttcggtactttatcaagttcaacacgaagcccgtctgcaagttctccgattgctacagatacaccgcctgcaccgaagtcattacatttcttgatcagatggctgacttcttctctacggaataatctctggatcttacgctctgtcggcgcatttcctttctgaacttctgcaccacaagtctcgatagactcttctgtatgaaccttagatgaacctgttgctccaccgcaaccatcacggcctgtacgaccaccaagaagaatgatgatatctcccgggtcggaattttcacggataaccgcacgtcttggagcagctccaagtacagcaccgatctccatacgttttgcaacgtaatccggatgataaatctcttttacaagtcctgtagccagaccgatctggttaccatatgagctatatccatgagccgcctcacgaacaagtttcttctgaggaagttttcctttcagagttgcatctgctgatactgtcggatcagcagcacctgtcacacgcattgcctggtatacataagtacgtcctgacagtgggtcacggattgctcctccaagacatgttgcagctccaccaaatggttcgatctctgtcggatggttatgtgtctcattcttgaagttgatcagccactcttcttctactccgtcaaccttgatcggaactacgatactacatgcattgatctcatcagactcttcctgatcagcaagctttccttcctttttcaggcggcgcatagccatcagtgcaaggtccataaggcagacaaatttatcttctcttcctttgaaaatctcgctgtgatctttcaaatattctttatatgttgcttcgattgtctctttgtagtcgccttcatcaaacttcacatcttttaattctgtagagaatgttgtatgacggcagtgatctgaccagtatgtatcaagaacacggatctctgtcatcgtcggatctctgtgctcttctcctgcataatagttctggatatgcaggaaatctttaaatgtcattgccaatccaagagaatcatataactctttcaattctgcttccggcatatctttaaaaccgtcaaaaatctttacatctgccggctcatcaaatactgtcaccagtgtctccggtttctctgctgcagcttctctggaatctaccgggttgatgcagtgattcttaattgcctgcagttcttcgtctgaaactccgccttcaattacatatgtaactgctgtacggattacaggagtttcatcttctttaataaaacggatacactgctctgcagaatccgctctctggtcgaactgtcccggaaggaactctacggaaaaacatttatctgtttcatttttcgggaattcttctttataaaggaaatctaccggcggctctgcgaacacaccattgcatgccttttcaaatgtttcttctgaaatattctctgcgtcgtaacgaatcagaactcgtacatttgtcacatcctgaagtccaagataatgacggatctcatgtctgaggcccttcgctgcaacagcaaactccggtttcttttctacatatacgcgctttacattactcatatataatctcctctttctgtattacgtgttcaagacacggtactaccttctttacattatctatttttatcctaccatagttttcttcattagtataattaataaaattaaacaatctgataagcaccgctaattgattgtcgttttctcgtatctttctcggagtcagcaatatttattctacttttttatcttttgtgcaacggatttttttattctgttgtattttccctttatttatcttataataagatgaatatttattaggaggtctaataaaatgatggatataaactacgaattatacaaagtattttatcacgtcgccaccacattgaatttctcagaggcatccaagcagctgtttatttcacagtctgctgtcagccagtcgatcaaaacactcgaacggaaactggatcagacgctttttatccgaagcacaaagaaagtccagctcacaccggaaggagagattctcctgcgccacattgaaccggccatgaatctgatccagaaaggtgaggctcagcttttagatgccgcttctaccggtgggcagatccgcatcggtgcaagtgacacgatctgcagatatttccttgttccataccttgagaaattccataagactttcccaaatgtacatattaaagttatcaaccagacttctttaagatgtacagagcttttaaagaacggactggtggatttgattgttgtcaattatccgaacgcagcgctcaacaatatttccgcctctatgaagatcaagaatttccatgatgttttcattgccggaaacaattatcctgaattaagggaaaagaaacttacacttgccgatctgctccactatccgatcctgatgctggataagaacagtacgacaaacgagtttcttcatcgcctgttccagcagcatcagcttgatctcgttcctgagatcgaacttacaagcaatgatcttctgatcgatcttgcaagaattgggcttggaattgcatttattccggattattgtctttccgagaacaaggatgatatcttcaagctggatatggaagaagagatgccggagcgttctcttgtaattgcttataatgagcagcttcctttggctaagcctgcacaggaatttttgaactattttgaagaacagtaatcaggatagcaactcctgaaaaataatgagaatcgttacatgacacaacgcagtaactattttactgtttccgcattcaataacggttctcattttttatctatcgatttttccagaattcttccatcttttcttttatctctttccgcccacatacttcatactctttccactctctcggaaaaagctgctgatactgccgattctgaaatcgatcatcaagtaaaaggataattcctctgtcgtcttcggtacggatcactcttcctgcggactgaagtactttattcattccgggataaaggtacgcataatcaaatcctcgcatccctctctggtcaaaataatttttcacgatttctctgtcattacatacctgtggaattcctgttccgacaacgatcactccgatcaatctgtcatgtgtaagatcgattccttctgaaaatacaccacccatcacacaaaatccaagcatcggatgatctctttcttcttcaaacatttccaagaattcttctctctgattttctgacataaattgcgattgaattaccagttctactccggatgcccgtttttcaaactcttccaaaacatcctccataaactgataggaaggaaaaaatgcaatatagtttccattcttcccatccactgtgcttctcagataatcggcaattttgcgatacatttctgtgcctctttgtgtatattttgtgcttgcttcacttccgatcagaattttcctgttctcctgtgggaacttagattcagcatagactgcataatcatccttctcaacagatagtaattgtttatagtaatcgattggaagcaatgttgccgagaaaaagatcgtagaattgccctggctcaaataatgattcaggttttgtgccggattcacacagaacaacttcactttaaaccttccgcttccttccagttctgtatactgtatataattttcatccaacagttcatgaatttccaaaaactgccttacctggaaaaagagttccataaatgcatccggctgctctgcatttcctgcattccgctcttcttcaagatatctttccatttgagttagaagattcatcagttttactgcaaatggggaaacactttccaccaaccgataattctcgcactcgcgtttcatctcaagcatcagtttattgacagattccagactcttcacaagttttttatctcgatccttcatcagttttttcacctcgagaatgtcttctttatagatggaagcactgtacatttcccgtccacgttccacgaggttgtgtgcttcatcgatcagaaacaaataatctccgctgacattgtctgcaaaaaatcgtttcaaatgtgccgtcggatcgaacacataattataatcacagatcaccccatccgcccattctgacagatcaagagatagttcaaacggacatacatgaaaatcttctgcctgtctttcaattgattcccgtgtcagcttcttttgtttttctaacatgtcataaactgcatcattcacccggtcaaaatgacctttcgcataaggacaagcatccggattgcattctgtctcctcacaaaaacagatcttctctttcgcagtcaatgtaattgaacgaaaagcaagacctttttcttcaagaatagaaaatgcctgctccgccacggttcttgtgatcgtctttgctgtcagatagaataatttatcccccaatccttctccgattgctttcaccgccggatacaatactgccatcgtctttccggttcctgttgaggcttggataaataatttctttttgtgataaattgtacgatatacggaagctgccaggtcaaactgcccttctctatatgcgaatggaaatttggtctgatgaatcgaagcatctcttctcttttcccactcaatctgcagttttgcccaacgttcatactgatgaaccagatcaagaaaccatttttctaattcttcaaatgtatactcttcccgaaatcttttcacatcttcagtatcaagattacaataggtcatctgaacactgatctgctttaatccctgctgtctggcataaatatatgcgtaacattttgcctgagcaagatgaaccggcacaggatgctccactcgatcaagggaacgcacgacgcctttgatctcatctattattgttttttctgattcaaggagaattccatccgcacgtccttccagttttaattggaatccgtcacacggaagctgcattttcaaggaaacttctgcctgataatttgaacccatcatacgctgaattttccgatgaaggcgtcctcccatcagcatcgcatctttatccagagttcctgaaatcctgttatcaatgtcaccttcttttaatatgaattcaaccagattccgaaccgataacctgatgattttctctgtttccatttcatttgcactccaaaatattatcgttgtaaaacacattgtgccaatcttttgatagattggcacgctgaaatacatcttttattttactttacttctttttcttttgcaacgcttgtttctgtacgggcaacttctgcgattgttttcgtaagtcctgcaattccctgaatctctgaaggaatgatgatcttcgtcgcttttccgtctgccgccttggcaaatgcctccagactctttaatgtaagaacagcatcatctgctccggcattcttaatatactcgataccttctgctgtcgctttctgtacagaacgaatcgcttctgcctgtccctctgcttctttgattcgtttctgtttctcagcttctgctttcaggattgctgcctgcttagatgcctctgcctccaggattacagattccttttctccttctgcaacaagaatcgtagacttcttctctccttctgcacgcaggattgcttcacgacgttcacgctctgctttcatctgcttctccatcgcatcctggattgccttcggtggcatgatattcttcagttcaacacgattcaccttgattccccactcatctgttgcaatatcaaggatcgtacgcatcttggagttgatcgtctcacgggaagtcagtgtctcatctaattccagatctccgatgatattacgaagtgttgttgctgtcagattctcgattgccgcaatcggactttctactccgtatgcatacttcttcgggtcagtgatctgatagaatacaaccgtatcgatctgcatggtaacattatccttcgtgatcactgcctgtggttcaaaatcaacaacctgttctttcaaggaaactctttttgccacacggtcaaggatcggcactttaaaatgtaatcctacgccccatgtctccttgtatccgccaagtcgctccacaacatacgcatgcgcctgcggaacgatacggatatttgacacaagaagccacaccacgatcataataatgatcatccaaataataagtccaaatatcatagctcttcctcctcacatttctctaaaatcagtttcactccggaaattgctgctactttggcaagcgaatctttctcaattctgtctttgtctgacttgcaccgtgcagtccattccttcccctgtgcaattgcagtaccggtctgtgcaaaattatcaactgtctctgtcaccttaacaacacttccaatcaattcatcacaattcgtcttcacatgatgcgcattaacatacttcgctgcaaagggcctggtaaagatcacaagcactgctgaaataactacgaatacagcaatctgtatcaccattccagctccggcaagcgaaactaacaacgccgccagcgcaccgcccgaaaaccagattgaagtcagaccaaccgtggcaagctcaataatcaaaaacaccaccataagccccagccacaaaaaaatctccctctccaaaaaatccgccccctttcgtttttgaatacgctaagtatctcagtcgataaatgtccgtcttcttacacactttcaaagggatgaggtagagcgagccggtgctcgtggtaatagcaggactggtcttgcgaccattctataaagtgctcatttccccatacgaatcccctcaaaaacacaaattactcacactcgcgaatcttctttctaagtggcagtaccatcgccggagatacagacaattcatcaagtcccatcttcaggaactcttctgtcagttcaaggtctgctccaagttctccacagattccgatccattttccttctgcgtgtgcattatctgctgccatcttgatcatagcaagtactgccggatgatgtggatcatagaactcatccagcgcaaggttctgacggtcaatcgccagcgtatactgtgtcagatcatttgttccaacactgaagaaatcaacttcttttgcaagttcgcggctcatcataactgatgccggagtctcgatcataataccaagttctacgtcttccttgaatggaagtccttcttctctcaactctgccttcacttcttcgatgatctctttgatcttacgaacttcttttacagaaataatcatcgggaacataatggaaagatttccatatacggatgcacggtaaagtgcacgaagctgagtcttgaagatctccggtcttgtcagacaaatacgaattgctctgtatcccagtgccgggttctcttctttcgcaagattgaagtaatcaacctgcttgtctgctccaatgtcaagtgtacgaatgatgactttctttcctgccatgctttctacaacctgtttgtaagctgcaaactgctgttcttctgtcggataagtactgttctcaagataaaggaactcacttctgaacagacctactccgcctgcatcattcttaagtactgcaccaagatcagatacgttaccaatgttcgcataaacgttgattttctgtccgctctttgtcacattctcttttcctttgagctggttcagaagttctttctgctcaaggtctttcgcacgcttctcctgcatctttgcaagtgtctcttcatccggatccacatagattgttcctgtaaatccatcaatgatagccatctctccatcgtacttcggattgagcgcttcccccattccgattacagccggaatattcattgttcttgcaaggatcgctgtatgagagttagaagaaccatacattgtagcaaatccaagcactttctctttatcgagctgtactgtctcacttggtgcaagatcgtctgctgcaacaatacaaggttctgtcatctcacgtgttccgttgctcactccgcagagaatatcaagcacacgctcggaaacgtccttcacgtcggctgcacgtccctgcatatatgcatcatccatagatgcaaacatctgtgcaaagttatcagctgttgttgaaacagcatactctgcattcacactctgtgtacggataattccttcaatagattccagataatccagatcatcaagcatcatctggtgaatctcaaagatcatggcgttggcctcacctacatcttcaatggctttgttgtaaaggtctttcagctggtcgattgctgtgttcttagcctcttcgaatctcttccattccgcatccacgtcatccacatgtgttcttctgatcaccttttcgtttctcttatagaacatcagctttccaatggatactccaccaaatacgctttttccttcaatcgttatcatatacacaaatcctccttgaaataaaatatttcatagacattggttaaattatataatacttccattcttttttcaatcagcatcctttctttatttttctttttctactcttgtgagatattgcgccttacgttttcatatcattatatgtattttgtgttactgttcactctcgtgtgagcagtaacattttgtcgttttctacaaaatagaaaagtttacatttgactttctttgttaaacatgctacaatagacaaagtgtcactatgaatttatactgacacaatattacagttttcagcgcattgtaaactgtgatgatttaacaacttatattcttttaatggagggcaacacaatgacaggtacagtaaaatggtttaataaccagaagggttacggatttatctctgacgctgaaggcaatgacatttttgttcattattcaggacttgtaatggatggattcaaatctctcgaagagggccaggctgttgagttcgaagtaacagaaggcgctaaaggacctcaggctgttaacgtagtgaaactttaatcaagactttatgtaccttttaattaataaatagaccgtatttaatttttaaaagtaatacagaaattcgattaacaaaaaagagctttttaagctctttttttgttgcacaaccccggcaatctacattacgcttacacgagaaatgcagttttgccggatataattattttattaacaaagtggatattttgcagtcagctcagcaaccattgcttttgctttttctacattctcttcactttcgattaccattgcaataatctctgcgatcttatccatatcatcttctttcattccacgtgttgtaaccgccggtgttccaagtcttacaccacttgttacaaacggtgaacgaggatcattcggaattgtattcttgttcgctgttacatgagcatcatccagacgcttctccagctcttttccgcttgtctctgttcccgacaggtctacaagcatcagatggttatctgtatctccggaaacgatcttcactccgcgtgctttcaaaccgttgcagagtgctttcgcatttttaacaacctgctccatatatgttttatactcaggctcaagtgcttccttgaagcaaactgccttaccggcgatcacatgcatcagcggacctccctgaattcccgggaatacagctttgttgaaattgaatttcttattcatctcttcgctgcacatgatcattccacctcttggtccacgaagtgtcttatgtgttgttgttgttgtcacatgcgcatacggaatcggacttggatgaagtcctgtagcaacaagtcctgcgatgtgtgcgatatctaccatcagatatgctcccacctcatctgcgatctcacggaaacgcttgaaatcaattgttcttgcataagcacttgctcctgcaacgatcagtttcggtttatgttccttcgcaatacgaagcacttcatcataatcgatcacgccgtctgcattcactccgtaatgtgctacatcaaaatatttaccggacatattaaccggtgaaccgtgtgtcagatgtccgccatgatcaaggttcattcccatgatcttatctcccggctcaagcatggcaaacataactgccatgttcgcctgtgcccctgaatgtggctgcacattaacatactcacatccaaacagtttctttgctctttctcttgcaaggtcttctactacatctacacactgacatccaccataatatctctttcccggatatccttctgcatacttattagtcagagggcttcccatagctgccatgactgctttgctcacccagttctcagaggcgatcagctcgatatgggagttctgtctctccatctctgcttttattgcatctgctatctctggatctgtgttcataatctcatcgaaatcgtacattatctcttcctccattaaagctttaccacgtcaaagcgttgtagtcattatagcacagcactttacatccgtctagcgcatttcctacgaaaaatcaaacaaggaaagctgattactctgtggaagattcccaaataatcccagttctgccatcaaatcgatcactgtcttacttacttttgtcctctgacggaaatcatccagtgagagatatggaccgtcttttgaagcttcttccacagcctccgccgccttatctcccattccttcgatgctggcaagagacggcatcagttttccgtcaatgatctgaaacatcttcgccttcgcccggtaaatatcaatcggcataaactccagtcctcgcgcgtacatttcctggacaatcttcatatccttcatgacatcctgttcttttttcgtcagagtatcgcttcgctttttatagtctttcatgtaataattcagtttatccttgccctgacacataatcgcataagaaaatgcatctgcacggattccaaagtaagctccataataagccagcggataattgatcttacagtaagcaatacgataagccatcataacataggctgccgcatgagcctttggaaacatatagctgatcttcttacaggaccagatataccagtccggtacatcctgcgctttcattgcttcttcccactccggcttcaatccttttcctttacgcacactctccatgattgtaaaggccagtgcactttccactcccttgttgatcagataaatcatgatatcatcacgggtacagattgccgtagaaatggttgcttttccggattttacaagttcctgtgcatttccgagccacacgttcgttccatgtgacagacctgaaattcggatcagatctgataacgtctgaggttttgtatcctgcaccatctggataacgaaatctgtaccaaactctggaattccaagacacccaagcttacagccgtcaatatcttccggtttgatcccaagaatttctgtaccatgaaatagttcgatcactttcttgtcatccagcggaatctccgttgcaacgaaaggatgctcctcattgtattcattttccattgcatcggaagtaatatagtcttccaatgtacgaatcatcgtaggatcatcatgtccgagaatatcaagtttcaaaaggttatggtcaatggaatgataatcaaaatgtgtcgttgtaatgccgcattccatatcgttggccggatgctgcaccggtgtaaactcattgatgctgtgtccgtgcggaagtactacgattcctcccggatgctgtccggtacttcgccggattccggtacatccttctgtaattcgttcaatctcacagccacgctttctctgaccacgttcttcataataatttttcacaaatccatatgctgtcttatctgccagcgtaccgatcgttccggctttgaatgtatgaccctcaccaaagagaacctctgtatatttatgagccttcgcctggtaatctccggagaagttcaggtcaatatcaggctctttatctcccttgaaaccaaggaatgtttcaaacggaatatcaaacccggccttaaccagtttttctccgcacacaggacaatttctatccggcatgtcgtaaccacagcctccggcaaatgcccggacctcttcagactcaaaatcactgtaatgacatttttcacagtaatagtgaggacttagcggattaacctccgtgattccagacatcgtcgcaacaaaagacgaacctactgatccacgggaaccaacaagatacccatccgcattggacttccataccagtttctgcgcaatgatatacataacggcatatccgttggaaataatagagttcagctctttctcaagtctggaagacacctgtaccggaagatcttctccatacatttcatgtgctttacgataacagatatctcgaagctcctgatcggaatccgcgattaccggaggacacttatttggatttaccggtgagattttctctaccatacgtgcgatcttctgtggattttctataacaacttctcttgccttcgcagaaccaagatatgcaaactcttccaacatttcatctgttgtgcgaaggaacagcggtgcctgattatctgcgtctttgaatccttttcctgccataatgatccggcgataaacttcatcttccggatcaaggaaatgaacgtcacaggttgctacaaccggcttaccgaatttctctccaagttcaacaatctcccggtttacattacgcagatcttcctctgtattgatattcggcgttttctcatcttcgagcataaacatatcatttccaattggctggatttcataataatcatagaaatccgccagtctcgcaatctgctgtgaagactgtttttcaagaaccgcacggtataattctcctgcctcacaggcacttccgataatgattccttctctgtgttcattgatcagacttttcggaattctcggtcttcttgcataatatgtcatatgagatgccgtgatcagctgatacaggttatatcttccaatatcattctgtgcgatcaaaataatgtgatgtgtcggcatcttacggattgcattaacattacgatccccaaacttgttcatttcttttaagttcatgatatgctgatctttgagcatttcaacaaattttacaaaaatttctgctgttgcacctgcatcatcaaccgcacggtgatgattttccaatgaaattccaagtgcttttgcaaccagattcaatttatatttcgaaagggtcggaagcagcacacgtgcaagagccactgtatcaacagatgtgaattcctgttccagaccaagcacacgacaattctgttcgataaacccgacatcaaatcctgcattatgcgcaaccaatgcgccctcaccaataaattcgagaaactgtggcagcacaacctcgattgtcggagcatccagcaccatctcatctgtaatacttgtcaggtttgtaatttcaaaaggaatcggacgttccggattcacaaaggtgctgaacttgtctacaatctgcccattctcaaccttcacagctccaatctcaataattctgtcacggatagaactgaatcctgttgtctcgatatcaaaaacaatataggtgtcatccaatgtctgatcttttgcattaactgcaatctcagttaagtcatcaaccacatagccttccacgccatatagaactttaaacggatcatctttatccaatgtctcaatatagtgatttgcaaccgggaacgcctgggctacaccatgatctgtaattgcaatcgccggatgtccccagtcatgtgctctgcggacgatatctgtcacttcagaaactccatccatatcgctcatctttgtatggcaatgaagttctacacgtttcgttggattgagatcttgccttgagaccgtaaagtctccaatcttcttgattccggtaattgaaccaattgtcagctcaccgtcgaatttatcaattgtcgtcacacctttgatcttaacgaaagcacctttcttcaaatctccgagaatctccggtaactgatcatttctggcaaacatcttgatcgtgattgtatccgtaaaatcagtcacagcaaagataatgatcgtcttctcatttctgatctctcgtgtatcaaagttgatgatcttaccatgaatcgtgatctcacccatctcagatacaacctgttccaatttgattggctcatcttcaaaattctttccgtagatcaggttcggatcgtctccgatcttcaccggacgcacataatccttcttgcggaattccttctttttgaactctttctttccgcccgaaacggatgcatttcctgaagaagattttcctgaagtctctgctttcttttctccggaagacgagcttcctgattcagatgacttcttctttgcctccacagcagactttcgctcctcatattcgcctctctgtttcgcgcgccgttcaaagattgcattaatttcctgctgaatcctctgctcgtcatattctctgcttccctgaccctcgttttctttatatgtaacccggatatcaacattcatatgaaaacgattcctgaatacatcgtccagcagattcatgatctcttcttttcttccttcggaaacaatcgtatcaagaagctccagacggacgacatttccctcttcatagttcacttctgcctgtgaaaacatgtttgcagcaaggacactgatttctttcagttcaagaatcaaactctctttgtactcttccatcactgtttccggtgtataaagctcagacagctcatactcttccagaatctgaagttttacagaagatgttccaaagagctgctctttgatccgctgctccatctgccatattttcttctttgggatcagatgatggctctttaaatgtacatgcagaaaatcacgaccggaattagtcgtgattttcttaacttccacatcagcaaagagaactttaaattcctcttctactttcaatgtgggaaatacatgaaaaaatgttttttcattctttatttgttccaattcaataactcctgtcttaaagtatcaagaagttcttcttcctttaccttcttgacgatctcacccttcttgatcaaaagtccttccccaatacctcctgcaattccgatatcggcttcttttgcctctccaggtccgtttacaacacatcccataactgcaactttaatatcaagcggaatgtctgctaccatctcttctacctggtttgcaagcttgatcagattaattcttgttcttccacaagtcggacaggatacaacctcaatacctcccttgcgaagtccaagtgtcttaaggatcagttttgctgtacgaatctcttctaccggatctcccgtcagggaaacacgaattgtattaccgattccctcatggagaatgattccaagtcctacagaagatttcacatttcctgagtatacagttccagactctgtaattccaacatgaagcggatatgggcattctttagcgatcagctcatgcgccttcacacacatcagaacatcagaagatttaatgctgacaacaaggttgtcataacccatagactcgatcagatgaactttatccagcgcactctccacgatcccttctgcagtaacaccaccatatttctcaagcagatgtttctcaagagaaccactatttacaccgacacggattggaacattgtactctttcgctttgtctactactgcctgtacccgttcttttgcaccgatatttcccggattgatacggatcttatcagctccattctcaattgctgcgattgccatcttataatcaaaatgaatgtctgcaacaagcggaatatgaatctgttttttaatctctttgattgcttttgcagcctccattgtcggaactgtacagcggatgatctcacatcctgctttttccagacgcaggatctgctccactgtggcttctacatcttctgtccttgtatttgtcatagactggattgcaatcgggtggtcccccccaatcacaacatccccaattcttacttctttcgtctgatttctgtacatgatctgtaccccctgtttccactgctctgcaagtactttctgtgtcatctgctgaggcagaatcaccttttactttccacttttttcaaatgtcttctgacttccatattctgaatccgtcagtgtcagtacgttctgttctacactgtattcgtaagttccttccatcacatccgcaacatctctaagatcctgctgggaatattttttcgtcttttcagcctgtgtggcaagtttctcttcattcacatgaatcgcaaaacgcttatgttccatgtcgatcgtatactcgaccggaacactgaccgtactttcatccaatgtctggacaattgtcatcgcaccattattcttgattttgagcttcattccatcatctgtattctcccagtttcctgccagaggattagaagtaaaaagcttcactgcaaaaaagatagcaattaaaataatcaagaccgatgttaccgtcataactgttctccaggctatatttctcttttcttcattatctttcagtaacataaaaatcacttcctttgcatatttatcttatccaaaaataccgccaataattccataggaaatgactgacataataaatgctgcgagacagacaccaacaacaactgccggaaaagcttttctaaaacggattccaagcagagctgcgatcagtgatcctgtccacgctccggttcccggaagaggaattccaacaaaaagtacaagaccccagaactcatatttctctatcttgtcacttttactcattgccttcttctccaacttctccaccatcggcttcaaacgcttcgttcctttcatccagtcaaagatctttgtgatcagtaaaaggatgaatgggattggaacaagatttccaatcacacagataggtactgcttttgcaagttccacgttcaaaaatgccggtcctgccgcaagcagtcctccacgcaattccagaatcggaaccattgagatcaggaagagaataaattccttaccgacctttccgcccagtgtcaccataaaccagttgatcaaagcttcactcattcagttatttctcctttatatatgttctcaaaaaatcaaaaagcgtctccatctcttctcttgtaccaattgtaattctcagatactgatcgattcgtggtgcattccaatgtctgacatagatattattctctttcaaagcctggaaaagttcattcgcatcaacctttggatgtcttgcaaaaataaaattcgcctttgcatccgggaaaacaaaaccaagtttcaaaagctcttcttttgcccattctcttgtttcaactattttacgaactccttcttcaaaatatactttgtctttaaccgcttccacaccacaggcaagagctgtctgattcatcgtgtaagagttaaaagaatatttcacatcattcaggcagcggatcagatccggattcgagattgcatatccgattcgcataccagccatacttcttgcctttgagaaagtctgtgtcacaataagattatcatacttatcgatcagttcaatcgcagatcttcccgcaaaatcaatatacgcctcatctacgatcacgatagaattcctgttctgctttaagataccttctacaaattcaagatcttcataaattgctgtcggcgcatttggattcgggaaaataattccaccgttttcagcataataatcctctttcacaatcttaaagttttcatcaagttctggacagtgataaggaatccgatataattctgcccagactttataaaatgaatatgtaatatccgggaagagaattgggagatccgaattaaaaaaggtgaggaaacacatagaaatcacatcatcagatccaactcctacaaaaacctgatcttttcctacgccataataatctgcaagacttccgacgagttcgtccgcagtcggatccggatacaggcgaaaacggtctgtgtccatctctttcagaacacgttccactcccggtgccggtggatatggattctcatttgtattcagttttacaaccttatgctgtggctgctcacccggtacatatggttctacgctacgtatatttctcaaaagttcttctcttacagccatggtactacctctatctatactctcttgcaagctccgcaaatttaggaagcgcatttacaattgtttcatatgctacacaatacgccattctgacatatccgggacatccaaaagagcttcccggaacgatcagaatattgtatttcttcgcggtattacaaaattctttttcatctgcaactggtgattttacaaagagataaaatgctccttccggtttgatgcactcaaatccaagttctttcaatccattataaagagtctctctgtttctgtcataatatgaaatgtctgtcttctcattcagacatgccttcaccactttctgctgcagtgtcggtgcattgacaaatccaagaattctcgttgcaacgttagctgcggcgttcagtttctcactgtctgccacttcatccggaatcacaagataaccgatacgttctcccggaagagaaagtgatttactaaaagaatatcctacaactgtatttgcataatactttgtgagatatggaacttctactccgtcataagcaagttctctgtatggttcatctgagatcagataaatctctgttccaaattctttctgtttcttctcaagaatcgctgctagcttctgaatcgtctcttcagaatatacaacacctgtcggattattcggcgtattgacgatgactgcctttgtttttggtgagagcttttcttcaaactcatcaatctttggctggaatgtctctgtatccggagatatctccacgatcacaccgtcataattatccgtatagcttctgtattctccaaaataaggagcaaacacaacaacttcatcacctggattcagcagtgatttcaaaatcacattaagacctcccgctgctccgactgtcatcgtaatattgcgggaagcaaagtttgttccaaagcgttcatttaaggaatcagcaactgcctgtctcacatcctcataacctgcattgctgttcgtataaccgtgaagcacgatcggatcctcttcggaaaggatctcgatcattgctttctttaccgcttccggtgccggaacatttggatttcccaggctgaagtcaaatacattctctgctccgtattttgctgcaagacggttgccctcttcaaacatcgcacggattgcagagctgttcgctaccatgttttccattttttttgaaatcattgctgtcctcctattcttgtcacaaaccctttctcttccaaaaaagccggacgataagataattttgccttacggagtccttcttccccggcatcatcttctctattcacataagtgtaatccatgcattcatgttcaacaaactgctgattaatcatagggtatgctccctgtacatctgcaaatgctttctcaatatgaacaacaaaggtatccttgcacagttcttcccctactgtaaaagcaacaattttttcgccatttctcaacactccgcctttaaagccgagttctttgtataaacggagggaattcaacgaaacgcacatctctgcgttcttctcaggatcatcattacatccattcgaatttctccacttcagagccatctgaaagcactcttctacattctcatcactgagtgattcgtaagaccagtccggataaagctgcttaaacttattaatatggtttcgctttccgtgaagcttctttcctgcaagtgttgcaagcttctccgtctcatagatgtaatctgcctgatctctgtcatattcaatccggaattgtcccggataccactcttccatctgtgaaaaattctccggtgtcacacagtaaagaccgaattcacagtcttcatcctcgcagatcttcatcaattcttccaatgcagctttgacggcttccggctttcctacagggtaagcataagtatgtccatctccttcatcacgaaatacaagtgcattatgaaggattgcatatttcactttatactgtctggaccagagatatacattcgcaaatgttctctcgcagcttctgcttggagcctgtgcgaaataatagtcaatcagttctttgtcttccagttccggtcgtttgaattccggtatcatccttgtactactcctccatctttgcaagcttcgctgtctgatccgctgcaatcaagctgtcgatcacttcatccagatcaccatttaaaatcgtatccaatttatgaagtgtcagtttgattctgtgatctgttactcttccctgtgggaagttatatgttctgatcttttcagaacggtctcctgtaccgatctggcttcttctctctgctgcctcagaagcctgtttcttctcaagctccaggtcatacagtttggaacgaagcagtcggaatgccttctctttattctgcagctgtgatttctctgtctgactgtaaatcacgattcctgtcggataatgagtcagtcgtaccgcagagtccgttgtattgacacactgtccaccgtttcctgatgcacgcattacatcgatacggatatccttctcatcaattacaacatcaacttcttctgcctcaggcattacggctacagtaattgttgaagtatgaattcttccgccattttctgtctccggcacacgctgtacacgatgtactccactttcgtacttcatacgggaatatgctccctgtcctgtgatcatgaatacacattctttgaatccgccgattccattctcattcagagagatcatctctgtcttccatctgcggctgtctgcataatgcacatacatacgataaacttctgccgcaaaaagtgcagcctcatctccacctgcaccggcacggatctcaacgataacattcttatcatcattcggatccttcggaagaagaagaatcttaagttcctgctccaattcttcaattctggctttagattcattcaactcttcttttgcaagctcacgcatctcttcatctgattcttcttccagaatcatcagactctcttctacattctgcttacagttcttatattcctgataagcttcaacgattggtgcaagatcactctgctctttcatcagcttacggaaacgctccggatcattcgccacatccggctcctgaagttcacccattacttcctggtaacgaattaccaaatcctctaatctgtcaaacatagttctatatcctcttctattttttatcttctttatctttttaatagtacacgccacagacgatgcggtcaagtcctgccaggtccttttttacgaacaccttgtcatatcccgcttttttcataagatcagaaacttctttgccctggtcatatccaatctcgaaagcaagtattcctcctgttttcaggaattgttttgcatcagtaacaatcttccggtagaaatacaatccgtcttctttcccatccaatgcactgaatggatcgtgaagtttcacttcatcttgaagcttctcaatttctgctgttctgatgtaaggtgggtttgataagatcatatcataagtttcactgacattttcaaaaagatcactcaaaatccagttcacttttccattctcatcctttttcgtgcttctcaaatgtttttcatttttctgcgctaccataagaacctgctccgaaaagtcaacacctgttccttctataaagatacccttttgttctgcataatgcattacgctcagaagaatacatcctgacccggtacacatatccaacagttgcaaacaatcttttgatctgaatgtctcttgtttcatcatctccagtgcctcttccacaagcacctctgtatcttgtcttggaatcagcacatgttcattcaccagaaattcaagtcccataaattcctgacttcctgtaatatgctgcaatggaatatgatttcttcttttttcaagatattctttatactttttccatgcttccggatccatgctctgatccggatccatataatagcgagctttcgtaatccctgtcacaaattccaacagataccacgcatccagatctgcctctgtaattcctgctttcgcaagaatttcttttccttctttatatgcatttttcaaacttattgaatcgctgcaatctgttttatacactgtcctcttgtctgattctgttctcattgcttcaggttctcctcctgccatgtcttccagtcaaacactgcttccactgctttgatcccaacctcgatcatactgtcatccggttcctttgttgtcagattctgaacccagagtcctggtttactaagtacattgattaccggatgatcactgtttccagccagacggatcaattcataagagattcctgcgatcaacggaagcagggcgatccgaagaagtactctcacaacctgggactttgccgtaataaaaaagcaaacaataatacttacgatcatgacaaagaaaagaaagcttgttccacatctcttatgttgtttggaactcttccgtacattttctacatttaattccaatccatgttcgatgcaattaatacacttatgctctgccccgtgatacataaatgttctcttgatatcctttgttctggaaatcagaacaatatagatcaggaaaacagcaacgcggatcacaccttctaaaacagtcattacaagatgtgaagaggtatgtttttctataatactactcagataatacggaagaaccataaaaataccaaccgcaattaagacagaaaccacaactgtcaggttcatgatcagtttttccttcttctcctgctttcttgcctcatcttctgtaagaatctcttcttcctcgtcttcaaaaaaacttgcagaataagtcaatgtcttcattcccagcacaagagaatccacaaaattaaaaatcccccgaatgaaaggaatcttttgcggtgccttccatgggagaactcctttgtattcctgaatatcaacttcaatctctccatctggtttccggacggcaacggaatatgtttcccgattcttcatcataatgccttccagcactgcctggccgcctatattcgatgatttcatatatttctcctaaacacaaagaggactgagatttccacctcagccctcatcacttcgtatttcttatttaataccgtatttcttgttgaacttatcaacacggccacgagcctgtgttgctttctgctgacctgtgtagaatggatgacacttggagcagatttctacgtggatgttctcctttgtagatcctgtaacaaatgtgtttccacagttgcatgttacagttgcctgataataattaggatggataccttcgcgcatgattttcacctctctatttttaaattacttattattttctctaaacagctttctaattgtatcacacattttttaataatgcaacacctttttagataaatttctgacggatgatctgctgaacaagctcttcgtttgtttttgtacgggaaaacatattcaaaagattgtccactgcctcttctgatttcatgccgttcattgcttttctcataatataaactgcatcctgttcttcctttgtgagaagaagatcttctcttcttgttcctgattttggaatatcaattgccgggaacactcttttctcctgaagcttcctgtcaagcatcagttccatgttacctgtccccttaaattcttcataaacaacatcatccatcttgcttcctgtatcaaccagtgctgttgcaagaatcgtaaggcttcctccttctctcatatttcttgctgctccgaagaaacgctttggactgtaaagtgctgccggatcaagaccaccggaaagtgttcttcctgatggcggaacgatcaggttatatgctcttgaaagtcttgtgatgctgtcaaggaggatcataacgtcttttccatgctctaccagacgttttgctcttgagataaccatttctgatactcgtttgtgatgctccggaagttcatcaaatgtagaatgaatcacctctacattcgggccttcaattgcctcacgaatatcagttacctcttccggacgttcatcgatcaacagaatcagaagatgcatattcggttctgtcttctgtacagatagtgcaacttcttttaataatgtagtttttcctgctttcggtggagatacgatcatacctctctgtccctttccaataggggaaacaagatcaacaatacgcattgctgttgtacagcccggattctccagacggattctctgattcgggaaaatcggagtcaggtcttcaaagttttttctcttcattgcctctgccgggcgcagtccattgatcgtagacacataaagaagtgcactgaacttttctccctgcgtcttaactcttgtatttcctgtcaggatgtcgcctgttttaagcccgaatctgcgaatctgtgaaggagcaacatagacatctccatctcccggaagataattgtcagaacgaatgaaaccatatccatcctgaagtacttcaaggattccgtttgctgtaaaaccactgtccagctgttcaatatctgtctcttcttttttctcttctttcacttcttctctcgcttcttctgctgcttctttctgctcttcctgctcatccagctcaagcattgcatcgatcagatcgcctttctttaatgtcgaaacacctctcatctttcttgcttttgcaagttctttcaatgttgccagtggcaatgattcatatttttctcgtgtcatattcttttcctttcttttcaggtatatctgttctgtcaatccacttcacatgtgcccttttcacatactggattattcattcatacttcgggaatacaagtctgattcgactttaatggaaatttgctttaaatatggtgttattatacagtatatttttctaaaaagaaagaactttttgaacttttctctgttttcctgtacttgcgtgtttcctttttcagtggtatcattaattcaatcaaatcagagaggtataaaatcatgacaaacaatgaaaaagctttaaaaatgcatgaagaatggaatggtaagatagagacaactgccaaagcgcatgtcaactcaagagaagatcttgccatcgcttatactccgggtgttgctgaaccttgtaaggtgatcgcacaggatcctgaagctgcatataaatacactatgaaagccaatacagttgctgttgtatctgacggaagtgctgttcttggtcttgggaacatcggtgcacttgctgctatgccggttatggagggaaaagcggttctgtttaaggaattcggtggtgtcaacgcagttccgatctgtctggatacacaggacacagaagagatcattaaatctgtagtcaacatcgcaccggctttcggtggaatcaatctagaagatatttcagctccacgctgtttcgaaattgaaacacgcctgaaagaacttctgaacattccggttttccatgatgaccagcacggaacggctatcgttgtcctcgccggaatcatcaatgccctgaaagtaacaggaaagaagaaagaagattgccgtgttgtagtgaatggagccggatctgccggagttgctatcacaaagctgcttctcacttatggtttccctcatattacaatgtgtgacatcaatggaatcatttccaagagctcaccgaacctgaactggatgcagcagcagatgactgaagttacaaatctggaagaacgcaccggaacacttgccgatgcattaaaaggtgctgatattttcgttggtgtttctgctccgaatattgtttctaaagagatggttgcttccatgaataaggatgcgattctgttcgccatggcaaaccctgtaccggagatcatgcctgaccttgcaaaagaagcaggtgccaaagttgtcggaacaggacgttctgacttcccgaaccaggtaaacaatgttgttgcgttccctggtattttcaaaggtgcattagaaggacgtgccacacagattacagaagaaatgaaacttgctgctgccaatgcaatcgcaggtcttgtttcagaagaagaattgaatgaaaacaacattcttccggaagcctttgatcctcgtgtagcagacacagtaagcaaagcaattaaggatttaatctaatatgtggggagagaagcgctaccactctcttgactatgcattaaaatcccagtttggagagaaagtatatcgcattgcattgaacggcggtatgacttgtccgaaccgtgatggtaagatcggatatggtggctgtatcttctgcagtggtatgggttcgggagattttgccggttctgcctgcaaaacaattacagaacagctcgcagaagggaaagccattcttgccagaaagcgtccggtgcatgcttatatcgcatatttccaggcttttacgagtacctatgcccccatagaatacttgcggaaagtttttacagaagcaatcgaagaccctgatgtaaaagtacttgcaatcgcaacccgccctgactgtttagattctgatgttctggaacttttagatgaattgaatcagatcaagcctgtctgggttgaacttggtcttcaaaccattcacccagaatctgccagatacattcgcagaggttatcctttagaggtatttgatactgctgtacatgaactgaagcgccggaatctgactgttatcgtacatgtcattttattcctgcccggagagactcatgaaatgatgcttgagacaatcgaatatttgaatcattcagatattgacggaatcaagttgcagcttctccacattttggaaggaactgatcttgcagttgaatatcagaaatatctttcagatcctgcctataccggtcctgctttccatatcccggatgcggacgaatacatcggtctgctcactgaatgtatccaacatttgcgtccggaaattgtcattcaccgactgaccggtgacggaccgaaggatctcttgattgcacctctgtggacaggcgcaaaacgaactgttttaaatcagatccacaaatatatgaaagatcatgacttgtaccagggaaaggagtattatggctgaaacatttacattatataaattgatcgtgttgtacatgttggatagagtcgattttccgcttacaacttcccaaatatcagaatttattctggataaagggtatacaacttatttccgtcttcagtctgcgcttgcagaattaacggattccggacttctgaaaattgagctgacacataatcgtacactttataatctcacagaagaaggggctgctacgatcaactatttcagaaataaaatttctcctgagattcgtcaggaaattgataattttatcaatgagaaaaaatatgatctgaaagaagaggtttctgttaaatcggattactatctgaatacaaaccatgaatatgaagtaaaatgccagattttagaaaatggctcccacctcatcgatatgacactcactgtgccaactcagactgaggcagaagccattgtaaataactggaatcgaaagaatcaggagatttacgctttactgctctcgcagcttctgtaaacgctccttgatctgtttctcataaccaagatcgccgggttcatagaacctggcgtcttttatttcatccggaagatactgctgatccacataatgattcggataatcatgtgcgtacttatatcctattccgtgtcctaacttctgtgcacctttataatgtgcatcctgaaggtgtgtcggaacagttgttttattgttccgtactgcatcgttcgctgcaaatattgcattaacggcagaattactctttggcgcagatgccacataagtcaccgcctgtgaaagaatgatctgagattccggcattccgatcctctcaactgcctgtgcagccgcaaccgcaacagtaagtgccatcggatccgcatttccaacatcttccgatgcacagatcataattcttctcgctataaacttcacatcttctcctgcatacaacatctttgcaagataaaagaccgctgcatccggatctgagccgcgcatgctcttaataaatgcagagataatatcgtaatggttatctccttttttgtcataattcaccactcgtttctgaatgcattctgacgcgacatctaaagtaatatgaatttgtccatcttcgcttctgtccgttgtcaatacacccagttcaatcgcattcagtgcatttcttgcatctccacctgacacatccgccaaaaattcaagtgcatcatcttctatcactgcatgaaagcttccaagacctttctcagtatcattcactgcacggagaagcagttccttaatatccgtcttctccagtggacgcaattcaaagatacttgatctcgaaatcaaagctccatttacctcaaaataaggattctccgttgttgcgccaatcaggatcaacgttccatcttccacaaatggaagcagataatcctgctgccctttattaaagcgatgaatctcatcaataaaaagaatcgtcttctttccatacattccctgcagatcttttgcttctttcactacttcttccatatctttctttccggcaactgtcgcattgatctgtttgaactctgcactggttgtatgtgcgatcacctttgccagtgttgtctttcctgttcccggaggtccgtaaaaaatcaaagaactcagcttatctgccttaattgcccggtaaagcaatttatcttttcctatgatatgcttctgtcccactacttcatccagtgtcaccggacgcatcctggatgcaagcggagattccttctctttatttgtctctctcatataatcaaataaatccatctttctctcctgttttcaatcttatattcacattttcaatccatgatcagatgatccactgtcacaaactcataacctttcccctgcaacagatctacaatccgtatagccgcctgcacagaagaaggataacagtcatgcaataaaataacatctcccggatttatctcttccacaactgtttttacaaccgcccctgcatcttcggtcatccagtccagcggatccaccgtccatccgatatatattctgctcagatcttgttcgctgtccaccgggagttccccgtaaggcgctcttgcgaacaccggttgttttcccgttatcttttcaatcactgtatctgtctgttccagttctttctttgcttctcccgtttccagctttgacagattgcaatgcgtataagtatgatttccgatcaaatgaccttcctcatacattcttttcacaattttttcattctcatctttttctacattttcgccgatcagaaaaaaggtcgccctcactttacgttcctttaatccatccaacagaatcggggtagaggatgcattaggaccgtcatcaaatgtaagcgcagcaaccggttttacctcatctgatacattctgacttcgcactgaatcagatgagacactcattgtttttctcccatccatctttatcagaaatggggacatgcccaaaaacaccagaagacagaaaaactgtactacataaccccaactttttccagacatcatgacagcttcccgcctttgacattcttactctattcttatgtcctgcacctcggcatcattccttcttttttctatgcttttctctgtattccgtcggacttgtcttcttcacttttcgaaatgctttcgaaaaataaagattattctcaaaaccaacagaatatgcaatcgccgaaaccgacagccccgtctctttcagcagacggcaagcctgctggattctgtattctgtcagatattcttttggtgaacaattcatataggtctgaaaagagcgaaacagatgacttctgctgattcctacatagtctgcgatatcttccactgtcacgggataagaataattggtttctatataattttctgccttttctacatacaaaagctttgcatctctttcctgatcttccccttcatgatagtgcataaagactgacagaagactgtaaagtgctccggtcatggcaaccgcttcttcatacccattgccctttgcattataaatctgttccaatccattccggatctgttcatccggcacatttcctctttttaaaaaaggacgttctttcagaaaacctgtatttcgaatgatcgatgccgcatccgtccccataaatccagcccaggcgtattcccatggttcctgctgatcggcataatactttacttccacgcccggatataaaataaacgtatctccggcttctaatttccacgtcttttctccaactgtatagtatcctgttcctgacaaaatatggtggatacaataatgatccctgactccgggtccccactgatatcctgcttcacacctttgatatcccgtgttatatacagacaacgaagtcatcagaatttctcctgacttatacgaatgtttgtaagtctctgccatctcccggctcctttcccgtatcctgtgatctattataacacctcatctttttaatgcaacattattacatgccacagcacgtattttttatagacgttttcactcattaacgatataataaatataaataaatctgatcgactggattacttttaatggaggtaaataatgatgaagaaaaaattgtttgatatgtttgcagaactttttggtaattccgaaggagctcgtttttacttttctcctggacgcgtgaatctgattggtgaacacacagattataacggtggacatgtatttccatgtgcactgacacttggtacttacggtgccgcacgcaaaagagaggataacaagatccatttttattccatgaatctggactcctttggtattgtagaagcatctcttgatgatctgacaaataaaaaagaatacaactgggcaaactatccgcttggtgtagtttgggcattcaaagaaaaaggacatacaatcacaagtggttttgatatggtaatttggggaaatattccgaacggttccggactttcctcttctgcttccctagaagttctcactggtgtgatcctgacagacctgttcgagatcaaagatctttccatgacagatcttgcactgatcggccagtattctgagaataacttcaacggatgcaactgtggtatcatggatcagtttgctgttgccatgggtaaaaaagaccacgcaattttccttgacacaagtgatttaagctacgaatatgcaccttgcgttcttgatggtgccaagattgtgatcacaaacagtaaagtaaagcatagtcttgttgattctgcttataacgacagaagaaacgaatgtgctgctgcactgaaagcacttcagagcgaacttgacattcaggcacttggcgatcttactcctgaagaattcgaggcacacaaatccttgatcaaagatgagatccagttacagcgtgcaaaacatgctgtatacgaaaaccagcgtacaatcgatgctgttacagcgctgaaagccggagacattgaaagattcggaaaattaatgaatcagtcccacatttcactgcgtgatgattatgatgtatcctgtgaagagattgatatccttgtagaccttgcatggaagattcctggtgttctcggttcccgtatcacaggcggcggatttggcggttgcacagtcagcatcgtaaaagatgaatctgtagatacatttatcgaaacaatcggaaaaacatatcttgaaaaagtaggacatgaagctgagttctacacagtagatatcggagacggtgcttctcgtctctgctaagatcagatgtgaaataatgtatattttgttataggaatgtcattggcattccttaatttaaggaggttcttgacatatgctttatgatgcgatcaaaaaattagtacagtacggaatcaataccggaatcactccggaatccgaaagaatttatacaacgaatcttcttctggatctgttccacgaagataactatgaagatgttgactgtgatctgaacaatcttgttctggaagacattcttgcagaacttttagatatcgccgcagaacgcggaatcattgaaaacagcatcggctaccgtgatttatttgatacaaaactgatgaatactctgatgccacgcccagctcaggtccagcagactttctgggaaaaatacaaagtttctccggagacagctactgattattattacaaattaagccaggacagtgattatatccgcagataccgcattgccaaggatcgcaaatggacggttgacacaaaatacggtactcttgacattacaatcaatctttccaaaccagagaaagatccaaaagcgattgcagcagcgggaaaagcgaaatcctcttcctatccaaaatgtcaactttgcgtagaaaatgaaggttatgcaggacgcctcgatcacccggcccgtgagaaccacagaatcatcccgatcacaattcaggataacccttggggattccagtactccccttatgtatactataacgaacactgcatcgtattcaacggacagcatattccaatgaagatcgatcgtaatgcatttgaaaagctctttgatttcatcaagcttttcccacactacttcctgggatccaatgcagaccttccgatcgttggcggttctatcttaagccacgatcatttccagggtggaaattatactttcgcaatggcgaaagctccgatcattgaacacttcactgtgaaaggttacgaagatgtaactgccggtatcgtaaaatggcctctgtctgttatccgtcttcagagcaaagaagtaaaacctctgattgatctggctgaacacattttaaatgcatggagatcttatacagatgaagatgctttcatcttcgctgagacagacggtacaccgcacaacacgatcacaccgattgcaagaaagcgtggagatctctacgaactcgacctgacattgagaaataatatcacaacagaagaacacccgcttggtgtctaccatccacatgctaaactgcaccatattaagaaagaaaacatcggtcttatcgaagtaatgggacttgctgttctccctgcaagattaaaaggagagatggaacttctgaaagattacatcctgacagaaaaagatatccgcagcaatgaacagattgcaaaacacgctgactgggtagatgaattccttccgaattacacatccatcacagaggagaatgttgaagagatccttcagcaggaagtcggaaaagtattctgcgaagtactcgaagatgctggagtttataagtgtgatgaaaaaggactggagtcattccatcgttttgtaggaatgttgtaatttgttgaacttggattcattatcactcaaataagtactttttaataaaaacaaacgtgagggagccactgtattgcatcggacaccggcccgctttacctcatccctttgacaatctgttagaaaaagccagaacaggcaccacacacggtaactgttctggctcttatgttacatactttcaaagggatgaggtaaagcgggccggtgctcgtggtaatagcagggctggccttgcgacaccattctataggctgtttaataccaattaatacagcttcgcactgatcagttttggtctgaatccagccttatcaagtgtatccagaatcttcttcttatgatctgttccgaatgcttccattgtgatacgaagttctacggctgcgtttctgtttgtgcttacaaactgattatgttccagtttaatgatgttaccctgtacatctgcgactgtctgtgccacacgtgcaagttcacccggcttatccggaagaagtacggatacagagaagatacggtctctctggatcaatccgtgctggacgatcgaggacattgtgataacatccatatttccaccacttaatacacagactactttctttcctttgatgtccatctgctttaatgcagctacggaaagaagtcctgaattttctacgatcatcttatggttttctaccatgtcaaggaatgcaccaatcagttcatcatcatctacgagaagaatatcgtctacattctctttcacatacggaacaactttatctccaacttcttttacagctgttccgtctgcgattgtatttgcagatggaagttctacaggctctcctgctttcagggctgctgtcatactggccgcttctgacggctctacaccgattactttgatctttggattcagcatcttggcaagtgtggaaacacctgtgatcagtccacctccaccgattggtgcaaggatataatctacagtcgggagttcctgaacgatctccattgcgattgttccctgacctgtagcgacatcaaggtcattaaacggatgaacgaatgtatatccgttctcttctgcaagtttacatgcatatgcgtaagcatcatcataaacatcaccatgaagtactacgtctgctccaaagctttttgtacggtttactttgatcagcggtgtaactgtaggcataacgatcgtagctttgcatccaaactgttttgctgcaaacgcaacgccctgtgcatgatttcctgctgatgctgtgatcagtccacggcttctttcttcgtctgtcagtgtgctgatcttgtaatatgcaccacggatcttataagctcctgtgtgctgcatattttccggttttaaataaacctttgctcctgtctgtgcacttaagtattcactgtaaatgagttttgtaggatttgttaccttttttaccagttcgctagcttcttcaaatttctctaatgtcatcatggtctttcttcctctctgtaaaacaacgcgtttacgaactcctctgagtcaaatttctgcaagtcatcaattgtttctcctacaccgatatattttaccgggataccaagttcagactggattgctactgcaattcctcctttggctgttccatccatctttgtcagaacaattcctgttatatctgttacttcattgaattcctttgcctgggcaagtgcattctgtcctgtcgttgcatccagcacaactagcgtctcacgaaacgcatccggatactctctgtcaatcacacgattgatcttcttaagctcttccatcaggttcttcttattgtgaagtcttccggctgtatcacacagaagtacatctgcctttctcgctttcgcagcagcaaccgcatcatatacaactgatgccggatctgcgccttcctgaccgccgatcatctcaacaccggcacggttagaccattcttttaactgctctcctgctgccgcacggaatgtatccgctgccgcaaggatcactttcttattctgtgctttcagctttcctgcaagtttaccgatcgttgttgttttaccaacaccatttactccgatcacgaaaaccacactctgacgattctcaaactcatacgctgtctctccgacatccatctgttcacgaatactgtcgatcacaagctgtctgcattcaatcggttccttgatatgctgctcttttactttaacctttaaatcttcaatgatgtccattgttgctctgacaccaagatctcccatgatcagagtttcttccagttcttcataaaagtcatcatcaatcttggaaaatccatgaaaaatactgtccataccggacacaatattatctcttgtctttgtcagaccggatacaagtcgtttaaaaaatccctttttttcttctcccattttcaagcctcctgttctcttaataccctgtttacaataaaaacaggtttatttttccagatcatcttccaacagatccacagaaacaagtgtggatatacctttttcctgcatggtgattccatacaaccggtctgctgctgccattgtaccacgtctgtgggtaataacaatgaactgtgtatattttgtcagcttatgtaaatatttcgcataacgatctacattgttatcatccagtgccgcttcaatctcatcaaggagacagaacggagatggcttcagattctggattgcaaatagtaatgcgattgcagtcagcgccttctctccacctgaaagctgcatcatattctgtagtttctttccaggcggctgtgcaatgatgcgtattcctgcctcaaggatgtctacgtcctcctgaagttcaagcgaaccttttccgcctccaaaaagctgacggaatacatcattgaactctgtcgcaattctcgcaaactgttctgtaaactgcttgcgcatcgcaacatcgagttcctcaatgatctgctcaagagaagcttctgcttccacaagatcgtcatgctgacctttcaagaatgtataacgctcagatacatttttgtaatcctcaattgcgttgacattgaccgaaccaagctttcggatctcattcttaagttcctggatctttttcttcatcaatgccaggtctgtcagtgtctcattacgaagttctttcgcatgattgtaagtgagctcatattcctcccacatgtaattcatctgcttctctgacgcttcctcatagccttctttctggctatttaaacggaaacattctttatcaagatctgacacatgcttcgcaagttcttctctttgtctcaggaaatctttgtgctgctgattcagttcctctcgcttcttgctctgtactttaatctcttcaccgatttctgtaaacagatcttttgaatcttcaatcgttttcttaagcccttcgatctcattttcttttcgcaaaatttcgtccgatacatctccacgattttctgagagttcttcctgctcttttgagtagcgagcgatttcttcctcgatacgggaaatattttctacaataaacgttttctgctgatccagacctgccagtgaaagatggacttcctcagactgtttcatctggacagcctcatcctctctttctttctccaactgcatctgcaaagcttcaatctgttcattcagctctttttccagcttctctgatgtctcaagttccatttggatagaatcttcgttctcattgatttcatccagctcctgaagcaatgctttctgttctttcaggaatccttcgtaacgctgtttcgattctaactgttctctctgtacctgtgcaacattcattcgcgcagtattctccagcactgattcttctcttaaatgttcctgtacttcatcaatcacattgtagcatgctgcacgacggttcttcgcctctgtaacttctttttccagcacatccatgtcagacttgagcatatcaaccgtcttctcgaattcttcgatttcgcggcgtctgctcagcagattacttgaattcttaaatgcaccacctgtcatggacccgcccggattgatcaggtcaccttccaatgtgaccaaacgcagagactggcggtattttctcgcaattgcgattccgtgatcgatgtggtctactacgatcgtacgcccaagcagctgatctgccagtccgtcaaatcttgattccacatggatcaatgtattcgcaagtccgatcacgcccggctctttaagtgcttccagattcctgattcctccgccgccatgcatacttgtcagcggaagaaatgttgcccttccgaatttattacgcttaaggaaatcaatcatacgcttggctgtatcttcattatctgtaacaatattctgaatacttcctccaagtgctgtctcaatagcaatctcatattccttatcaaccttaatgatatccgctacaacaccgatcagacctttctcacgttctttattcgacattacctttcggatactgttaccatatccgtcatagcgctctgtaatattctttaatgactccagacgggaagattctctgtgataagcggtctgtccgatccgtaacttttcctgcttctctttcagctcattctgaagcttgccaagttcctcttcgttcagggaaatcttatccttataggtttgaatgcgctcacggatctgaccaagttcttcttcatacttcttaagtctgttgttctgtccttctgctactgtcgaaatctcaagaatatttctggcaacgacagccttgcgtgtctggatctgttctttcgtcgtatcaaaatgctgaatcttagcttttgttgaagcacgatttccaagcaagtccatgatctcccgcttcttctgctcgatttcagtgctgtgttctgcaatctttgactgaatctcaattaaactctgctgtgcttccgtatcctgtccactggctgattctaactgttctgaaattcttttcttctcttcttcaagctctcttttctgctgctgccttgtatctatctcactgacgatcgtactcaggcgatgatcataatgctcatcattcatacgggctgtattgatctgctctttcaggacattgatctggccttccagctgttgcttcaaaagattcgtctcattcatctgattcttcgcagtctcaattgcaagatcaatctgatctacttcttcctcgattgcctcgtattccgctttcatcttctcataacgggcatttgattcctgcatctcctgagaagcaatctcatatttcccaccgacttcacgaatacgctcctggagacgctcttcctccagtaaaaacatattaatgtcgtatgtttttaattcttctttcatcttcagatagattctggctgtctctgactgtctttccaaaggaccgatctgtttctcaagctctgcaagaatatcattcacgcgggtaagattctgccgttcatcctccagctttttcaaagaaagggactttcttctcttatattttacaattccggcggcctcatcaaaaagttctcttctctcttccggcttaccgcttaagatcttatcaatctgtccctgaccgataatcgaatagccttctttaccgatacctgtatcatagaacatctcattgatatctttcaatctgcaggctgaaccattgatcagatactcactctctccggatcggtacaatttacgtgtaacagtgacttcttcgtactctaccggaagtttatgatctgaattatccaatgtgattgcaaccgaagcataactaagcggcttccggttctcagttcccgagaaaatcacatcctgcatggtgcctccacgcagctgcttcactctctgctctccaagaacccagcggacggcgtcagcgacattactcttaccacttccattcggtcctacaatacctgtaattccgttatgaaattcaaatttaatcttattggcaaaagatttgaatccctgcacttctatactctttaaatacataaagtcctctttactttttctttctgagattcagaattgcctcataagctgcctgctgttctgctgacttcttcgagcttccttttccacgtccccaggcttttcccccgattcttgcttccacttcgaaaatcttattatgatccggtccctgttcatcaatcagttcataacttacattccccgtcatattcgcctgcacgatctcctgtaagattgttttactatcataaaagagttttttatcctctaaatctgtcaaaataaaatgatggataaactcttttgcattagtaaaaccaccgtcgagatagatagcaccgattaatgcttccatcgcatcagatgtgatagaatctctttttcttccaccggtcgcctcttctccttttccaagaagcaagtaatctccaagtccgatatctcttgcacacattgccagagacggttcacataccatacttgcacgtgtctttgtcagttctccctcagatacctttggaaattcattaaataaataagcacttgataccaattccaatactgcatctccaagaaactccaggcgttcattacactcatatttcttcaaatgtttctcatttgtataagaactatgcatcaatgcacgttcgatcaggcttttgtctttaaacacatatccgatcttttgttccagttcttttactctgtccatttaaatggcctcctttgtgttaataaacgaaaaagcccaaacgggctttttcatctcactatctgattattcattagccttctttttctggatctgatcaacagcatcctgcactgttgtgatcttctctgcctcttcgttatcgatctcgatgtcaaaatcttcttcaattcccataatgatctggaaaatatccagagagtcagctccaagatcatctacgaatgtagtatccggtgtgattgtctccggtgaaacattaagtacgtccgcaataattgcctgcagtttttcaaattctgtcattgtaaaactcctcctgtcttattcgacttctttctcttctttcttttcttccagggtctcctgttgaattgcctcttttatcttctcattgatcttctgctccttaaatgcaacacactgaatgattgagttgcatacctcctttgactttgaacttccatgtgtctttactacaagtccgttcaggccaagaagcggtgcgccgccatactcacttgtatcaaaatctttcagtacaccctttaaagcaggtttcacaagcagtgcccctatcttactacgcaaagaagaaagcattcctttcttcactttcttaagcagtgctcctgcaacaccctcataaagcttcagaataatattacctgcaaatgcttcacagacaatgacatctgctgctccgtaaggaatatctcgtgcctcaacacttccaatgaaattaatgtcaggacattcttttaacagtgggaatgtctctttcaccagcgcatttcccttctcttcttcagcaccgatattcacgataccaactgtcggattcttctttcccataacgctttccatataaatggatccaatctttgcaaactgtaccaggtgagatgggcgcgcgtctacattagctccacaatcgatcaaaagtgaaacaccttttaatgtaggaatcagtggtgcaagcggtggtctttcaacacctttgatcctgcctacaagaacctgtcctccaacaagaacagctcctgaacttcctgcagatacaaaagcatctgcttcccctttcttcaccatcttcatcgcaacaacaatggatgaatctttcttaccacggattgctttcaccggaggttctgccgtctcaataacctctgtagcattcacaatctcaatctgctcctttggatacgtataagcggagagttccttgcgaatcacatcttccttacctgtcagcagtaccttgatatcttttctcttctgcactgcctctacggcaccttttaccatctctcttggtgcattgtctccacccatggcatcaagagcaacccttgtaatctctgacatatcatttcctccttgcgctactgaaattattctactggatatcagtataaaaatcaataaaaaaaggcgtaaaacacaaagtttttacgccctcaagtgttctgttcgcagtacactcaatatcttattgatcattagtcaactgaaacgatctcgcgcttgttgtaagatccacatgccttacatacacggtgtggcatcataagctcgccgcacttgctgcatttcaccagattcggtgcgctcatcttccagttagctcttcttttatctcttcttgcttttgaagatttattctttggacagattgacataggttacacctccttaaaattcttaaataagtcacggacaactgacattctcggatcaagccctgtatcttcacagttacaagaccccgtatttaaattctgaccgcatacattgcataatcccttgcagtcttccctgcaaagtactttcgtcggccagctcgacaaaatctcatgaaagagcagtttgtccacgtcaagatgatatccgtcaataaagtttgattcatccagctcctctgtcagttctgcgtcggagaggcctacgtccacatgtttcacacaattcagttcaaactcccgtttcacatcctccagacaacggtcacatggaatcatgacactcaatctggtctcagctgtgatgagcagttcttttccccttatatgctctactttaacatgaaccggctccttgctgataatggggtaggttccggattgtaaccggatctcttccatctccagccgcacagtttcttcaaccgtcttatgctggtctgacaaaacgtctgataggttaatcaacataatgtatttctcctattcatacctaaactattatatcatggaaaaaatgtttgtcaacagatatttataatttctattaaaaatattgtgaagagcaaaatgtattggatacatttttgcttcttctatgcgcaaaagcaggactgaactgctctcctggcacctcagtcctgcgctcatatacgatataatctttacagatcaccatcgtatacactttctcatattaagatttcttcaattattttacaagcgctaatgtctcacgagcgattgcaagctcttcgtttgtaggaataacaaatacttttaccttagatccttcttttgtaagctcagcttcttttcctctgagtcctgtattcacttcgaaatcgaaatccactccgaggtatccaaggtatttacatacttcctgtcttacataatcatcgttctcaccgataccagctgtaaatacgatgtcatctacaccattcatagctgcagcgtaagatccgatgtattttgctactctgtatgagaatacatccatagcgatcttagctttcttatctccggcattcatagcgtctgtcaggtcacggaagtcacttgaaagtccgcctgaaattccaaatacaccagactttttgttcagtacttccataacaccttcaatgtcaaggttctctttcttagcaatgaactccatgattgcaggatcgatatcacctgaacgtgttcccattacaagtccttcaagtggagtaagtcccatagaagtatctacacattttccgttaagaacagcacttacactggatccatttccgaggtggcatacaattgtctttacttcatcgtaagattttcccattacttctgctgctctcttagatacgaagctgtggcttgttccgtggaaaccgtaacgtcttactttgtatttctcatagtactcatatggaagtccatacatataagccttctccggcattgtctgatggaaagctgtatcaaatactgcaaccataggtgttcctggcatcagtttctcacatgctgcaacaccgatcaagtttgccgggttatgaagtggtgcaagatcattacactcttctactgctttctttacttcgtctgtgattactacagatgaagcaaacttctctccaccatgtacgagacggtgtccaactgctccgatctcatcaaggctcttaacaactcctgtcttctcatttgtcaaagcatcaattacaaactgaattgcttctgtatgagttggcatagccagatcagatttctctttctctccgccagccggctgatatgtcagacgtccgtcgattccaattctctcacaaagtccttttgcaagtaccttctctgtctcagcgttgatcagctggaatttcagagatgagcttccgcagttgattactaatacgttcattttcttttttcctcctgaaaaaaccttattattattatccgagggcagctcacactaccctctttgtttcttttgattacccgtaactattttaaaaaatctgtaaacaattacaattattcagcctgtgcctgtacagctgtgatagctacaacgcctacgatatcttcagcgctgcatccacgggaaaggtcgttaaccggagcggcgattccctgtgtcagaggaccgtaagcttctgctttagcaagtctctgaacaagtttgtatccaatattaccagcatcaaggtctgggaatacaagtacgttagcatgtcctgcgaccttgcttcccggtgctttagattccccgactgatggaacgatagctgcatcaagctgaagttctccgtcaagagcaagctctggtgcgagttcctgagcgatctttgttgcctcaacaactttatctacatctgcatgcttagcacttccctttgttgagtgagaaagcatagcaacaactggctctttctcaacaagcagtttgaaagaatctgcggatgaaatagcgatgttcgcaagtttctccggatctggattctgctcaagtcctgcatcagcaaagataaatgttccgtttgctcccatgtcgcagttcggtactaccataaggaagaatgcggatacgagctttgttcccggttttgtcttcaggatctgaaggcatgggcgaagtgtatctgccgtagagtggcatgctccggataccattccgtctgcatcacccatcttaaccatcattacaccatagtataagtagttactaagaagcagttcttttgcctgctcaggagtcattccctttttctgtcttaactcaacaagttttgcaatatatccttctgttcttgcatctgttgcaggatctacgattgttgcaccggagatgtcgtatgtacctttgttcttctcaatctcctctttgcttcctacaagcaccagatcagcgagtccttctttcagtactgtctctgctgctttgtaagttctttcgtcctctgtctcaggaagaacgattgtctttttgcaagctttcgctcttgctttgatttcatcaataaatcccatgatttaatgccacctttctttttatctcacttagtcctattataactcaatcgttttttgtatacaagtcattttatgtgcattttcaaatacaatctgaactttgtaataggatatttgtaagattgttacaattttatcaaacattgtctttttctaagaacattacgagccagaacagtcacctctcacgacaactgttctggctcttattaaaatttacaccttcaaaaccccttgcttatattcattctgaaacgccgtcttaaacttatccgtcaccactgaggtatacagatttgaagcaagcatatcatgtctgagcattttctgaccaagttccggaagatcgtcaatttcagacattttcgtcaaaaccggaagactgctttcctccgacatagctgtcaaaagctttgcattgtcttttcgaaaaccaagcaggcgtgcatacatatgatagccattgtcaatatattcttccacatttgcctttttcgttccaagcataatatgaagcaatgcccggttaactcgggtctgcgtaagttctcgtgtttttaacaaatcacagaactgtttataattaaaaaagttgtttaactgattcgcaattctgaatgcaatctccggagagacatccacatatcgaaccaaactttccggctgtttatttaacagcttatatttcaaaatcagagaaaagtcattctgtgaaatcggatactgtactttatgataatccttcaaaagttccagacaacattttggaacctggttttccaactctgacagtattcccgaaaacgaaagctcatcgtaatttccttctactggttctgtattgaaagatgaacttgaataagcaagcagtgaacgaattgccgtagcggaactataatcactgtccagttcttcatcatgatactgtgcaccacgtcttgcaatcgtataaggttccatcctgcttccaagttttttgattgctttcaaatattcaatccccaaaatattgttcggatttcttaaaatctctgcaaaccgaggatcttctgtataagaaagaattgcttcctgtctggcgcgtggaaaagacatcccttgtttcagataatctttcaacagaatctggtaggcttcaggttcttcaagaagtagttctgcaagctgttccaagattgggagatcattacattcactgccaaaacagatagaatcaacaattccaagagactccaaaagagatacggatccaagtgcaaaaagctccgcagatcccgtcgcataacagaccggaagttcaaagacagctccagcaccacacatcagtgccatctctgcacgtatccttttcggcatgattgcaggtgttcctcgttgtacatagtcaccactcataacaacaacggctgcatctgcaccggttacacgcagagattctttaatatgataaagatgtccattgtgaaatggattatattctgtaataagaccaacgattttcataatattctcctaaaaaagcagagtactgctcacaccacgtgtgaacagtaccacctctcaccaatacagattatgtaactgttcagagccaacttccaaaatgctacgcatttcgtcacagttaccagtttacaatctcttcatgcaagtaatcgccagtgccccctgaccaatatggcaggccacactcaatgacaatgatccttccataatctcatatcccggaaatctttcttcaatctctgctttccactcctgtgcttcttctttactgcatgtataagccatgccaagaaccatctgatccttaacatctgcaaagcgtccattcagatctttctcgatcgcgttaagcattgtcttcttcgctgttttccagcctcttgctttagaaaatgcatccagcttttctccctggatctgaagaacaggctttaagttcagcaccgttccgattgccgccgctgccggtgtgattcttccaccttttttcaggtattttaaagtatccaccgtaatataaatacttgcctgaagtttttctttctccagtatttctttaatctctgctgcactctttccttcttcacgcagattcattgcatccagaacagactgctcctgtgtaactgaaattctctgattatcaaccacctgaacacgtccgtcatattcagctgcaagagtaatagctgttgcacatgtgctgctcaaaccactggacatcggaatacatacgagctcatcatattcttccagaactttatcccaaagatccatgacctctcccggggatggctgtgatgttgaaatatcagaatctgctccgagcttttcataaaactcactctgggaaagtgtgatatcctccagataaagttctccatcgataaaaaatggcatcggaaggacaaaaatcccaagttcttttccacgttcctgtgttataccgctattactatccgttacaattgcaactttactcatcaaatttctccctattaattcttaaaactatgaattggagccgggatacgtccctgtctgttgataaacgcatcacatccgaattcattcaccggcataatcggtgcataacctaacagtccaccaaattctgccacatctccaacgtctttaccgataaccggaatcaggcgcactgctgttgtcttttgattgaccataccaattgccatctcatctgcaatgattcctgagattgtcgctgctgatgtctttccaggaattgcgatcatatcaagtcctacagagcatacacatgtcattgcctctaacttctcaagtgtaagagagcctgcatttactgcatcgatcattccctgatcttcactgaccggaataaatgcaccgctgagtccacccacataagaagatgccataacgccgcccttcttcacctggtcattgagcattgcaagtgctgctgttgttccaggtgcacccacgcgctccagtccgatttcctccagaatctctgcaatactatctccaactgccggagtcggtgcaagagaaagatcaatgattccaaatggaattccaagacgtgcagaagcctctcctgcaacaagctgtcctactcgtgtaatcttaaacgccgttttcttaattgtttcacagagctcttcaaaaccttttccacgtgctttttcaatcgctttctttacaactcccggtccgctgacacctacattaataatcgtatctgcctcagtcacaccgaggaatgcacctgccataaacgggttatcatccggtgcattgcaaagaataacaagctttgcacaaccaagagagtctctgtccttcgttgcctctgccgcttctttcacaatctgtccacacagacggaccgcatccatattgatacctgtctttgttgatcccacattgacggaactacagattctctctgtctcggccagtgcctgcgggattgaacggatcagattctcttcgcttggtgtcattcctttcgacacaagtgcggagtatccaccaatgaagtttacacccactttttccgctgcgcggtcaagtgtacgtgcgattgtcacataatcttccggagtcttacacgctgctgctccaacaagcgatacaggtgtaattgaaattctcttatttacgatcggaattccgaattctttctcaatgtcttttcctgtagatacaagatcttttgcaactgttgtaatcttctcataaatcttacggttcagttcatccaaatcagaatccacacagtccaacagactgattccaagagtgatcgtgcggacatcaaggttctcgctttcgatcatcttattggtttctgatacttcatacatattaatcatagtcttatcctcgccttatctccgactgtttacagacggtgcattttctcaaaaatctcttctctctgacaatgaattgttacaccgatctctttgccaagtgcatccatctcatcacaaacttctttgaaatctttcttcagattcgcaacatccacgatcatcatcatgttgaagtatccctgaacaattgtctgtgaaatatcaagaatgttgatttcattttctgcaagatatgtacatacttttgcaataattcctactgtgtcttctccaagtactgtgacaatacatttcttcattctttctgtacctccgctttgattcactcaattttatacattaataatatccgaaactgattcccggcttgcaacgaacatattcaggtcttcccctttatattcattatctgcaagcgtaacttccagcttcactgtctcataagcaagtcttgcgtaattgttctccttgctcagatgaccaagcatgatgtgtttcagattatcatgtagtatatcacaaagaagctgtcctgacaattcatttgataaatgaccgcgatcgccaagaattctctgcttcaaataatatggatatcctccgacttccagcatatggatatcatggtttgcttccaaaaggatcgcatccagatttttcagattctccactgtataatcatcatattttccaagatctgttgcaactgctacggacttcccgtcttgttcaatacgataccctgacggttcatttgcatcatgagaaatggcaaatgggtgtacgtccagttcaccaagctgaaatgggtgatctgccttaatcggatgtaaaagtccttccggcatctttccaagactagaagactctttgattcctgcaatcgttcccggcgtcgcataaattgggatctcgtactttctgctgaacacaccaagtcccttaatatgatccgaatgttcatgtgtgatcagaatcccatcgagttcgtcccctttaatctccaacttattcagaccttcttcaattcgtttcttactaatccccgtatcaatcagaagatgggaattatcacttcctacatagatacagtttccactgctgccgcttgcaatactgcacattctcatttgttcaatctatctcctatttgtctctttgttgcttcaaagtctccactattatcaattacaactgtgcatgcctttcgaaacacttcttctatcggttgtgaagcaatcattctggtgatcttttcatccgtgtaatgtctggaacttttcagtcgttctctccggaccgcttcatctgtgtaaatataccataattcatcacacagttcctttcctacttccggaagaagtgctgcttctactatataataagagcaaccttcttcttttttcttcaagatatctttccgaacccattccagcacttccggatgcacaatatcattcaatatttgtaatttcttctcatctgcaaatacgcagcttccaagtttcatgcgatccagttcaccattgtttccgacaatctgttcaccaaattcttgtacaattctcgaaaacgcctgtgtccctttcctctggatctgctttgcaacttcatccatctgacagactaccgcaccgtattcctgttcaagaaattttaaaacttcactttttccggagccaactccacccgtgattccaattactttcatcttattttgcctcataccagttcttccctgtatgcatatctacactaagcggaactaacaattctgctgcgtgttccatcttatcctgaaggatctgctgtacttcttctaattctgtttcatctgcttcgatcaaaagttcatcatgcacctgaaggatcatccgtgatttcagatttctcttcttcagttcttcatttacatgaatcattgctattttaataatatctgcagcagttccctggatcggtgcattcattgccacacgctctccaaaacttctctgcataaaattgctggattttaattccggcatcggtcttcttcttccatataaagtctctgcatatcctttttctttcgcatcgctcacacatttatcaagaaatgtcttaattcccgggtaggattcaaaataatgttcaatatactgtgccgcctcttttctcgaaatactcagatcctggctcagtccaaaagaactgattccatacacaataccgaaattaaccgcttttgcatttctcctctgcagatctgtcacttcattaaatggtacatggaatacctgggaagctgtcattcggtgaatatcgcgcgcctcacggtatgcctggatcagctgttcgtcaccggaacaatgcgccagaatacgaagctcgatctgagaataatccgcatctacaaagacgcagccttcttttggtacaaatactttacggatcagacgtccaagctccatacgaaccggtatattctgcagattcggttctgtactgctgatacgtccggttgctgtgatcgtctgattgaatttactgtgaattcttccatccatccctatataatttgcaagtccgtctgcatatgttgacttcagttttgcaagctgacgatactccaaaatctttgctacgataggatattccggtgcaagtttatctaacacatccgctgctgtagaatacccggtctttgtcttctttgcatgaggcatttccagtttttcaaaaagaatcatgccaagctgttttggagaattgatgttaaactcttcccctgccatttcataaatctctttttccagctcaacgattcttgctccaagctcttcgccgtaacgcttcagctcttcgccttcaatcttaacgccagcctgttccatatcatacaatgtaaatactaacggcatttcaatttcattaaataaacggaacatcccattcttttccagtttcttttcaagaaccgggacacaggcataagctgtatatgcctcataacatgattttgtaccctcatcaagtttttcatcaattaaaagattcaaatgttctcttgccacatcttctgcattgtaatcatttttcagaggattcagaagatatgctgccacgatcgcatcaaacccgttctcacttgtaagttccggcagccattccagatattctttcaatccacacattgaaaaacatttcacactttttgcaaggtgagacaactttcctgtcagatattcaaaatcagcatccatatcacaaggaatcgtaacaatcttttctgctccatagcaaagagaaatccttccatatcctgaagcatgtgcaaacaatgggagaacatttccagcatctttggaaaatgccacaccaacggtttctgctttctctgcctcttttaaaactttctcaatctcctttttccctgttatctcacggaaatatttttccacatcattcactgacgcttctacatcaaatcttccaagcagatttttaaactccagtctttggaataattcatgggcttcttttgtataaggattctcatgtctggcattttcaagttcaaaggtaatatctgcatccagtttaatcgtcgcaagtgtcttactaagctgtgcctgctcccagaattctttcagattcttgcttgctcttggcggtttcagctcatcaacatgctcgtatgcattttcaatcgtctggtactgctgaatgatctttgtcgctgtcttttcgccaactcccggaacaccaggaatattatcagcagtatcacccatcaaagcctttacatcaataaattccttcggtgttactccatagcgttcctgcacatctgccgcataataatcttctacttccgtcttcccctgcttcgtctttgggatacggatcttaatatgctctgtcgcaagctgaagcgtatcgcggtctccggaaatgatggaaacatccattcctttctcctcacaacgatgagacaaggttcccaaaagatcatccgcctcaagtccggccttttcaatcacttctatatgcatcgcacgcagaacgtccttgatcacaggcacctgctgacgcagttcctctgccatcggctttctcgtgcccttataatctgcaaacatctcatggcgaaatgtcggcgcatgcacatcaaatgtaaccgtcagatattccggcctctcttcatctaatatcttaaacataatattcaggaatccataaactgcgttcgtgtgcagtccttccgaattcgtcagatccggaactccataaaacgcccggttcaatatactgtgtccatcgatcagtacaattttatctctcatcagattctctcctattatctcttgctttttgttgcatttaattttaaccattattaaagtatacactaattaacttcttttttaaaggttcattttatggtatcataatttagggagtgaacagtaaccttttgactccaatattttctaaacaatattttcaaaaatactatcaggagaattattatggatggaattgtatttgatgtagatggaacactttgggattctgttgaagttgtagccgaatcctggaatcttgcaataaaagagaactctgatcttgagccaaacttaaaccgcgaaattcttcagggactgtttggaaagacaatggacgaaattgctgccggagtttttcccgatctcgatacggactctcgaagaaaactgatggatatctgttttgattatgaaaaccgctatcttgaaacacatcccggtgtttactacgaaggtgttatggacacactcaaagagctggctctggaatatcctctttttattgtaagcaattgccagtgcggatatattgaagtgatgatgaaaggcgcaggcatggaaccatatatcaaagatttcctttgttttggccagacgcagacttccaaagaccagacgattctgaaattaatggagaaaaataatctgacatcccctgtctatgtcggagatactcagggagatgctgattcctgcaaaaaagccggtatcccttttatctttgctgcatatggtcttggagatgttaaggaagattatccgacaatacattctttttcagaattaaaaaacattttaagggagcttgattaacatctccgcttctgtttacttttttcataatcgcggattttacgcatcaatccgcgataaatcttatcctgaagcagttcccgatgttcatacgataccggatattcgttcatgaaatcgggatgttcttttatatagcaatctctttcttctttcgttgcattcaacagatacttttcataataatccatatcatctattttttctttattcatcactttctcccatcccccttagttcttatgctgtctcatttctcgcacatttttcatgtttttatcaattatagtcgtagtacgactatatttcaatagtcgtgtcaggacttttatataataatccaaaaatacaaaagatatcagattattgttcactggatactgtgaacaatagcttgtttccggttaagttcgcacaccggctttaaggtacgaggatgggattatgaaattcgaaaacatacgaaatttgcgagaagataatgataaaacgcagaaagaagttgctgcatatctcaacatcaaacagactacatattctaaatatgaacttggaaaaatcaacgttcctattgatgtcttcatcaaacttgctgattattatacagtctcaattgattatctcgttggacgtgggaaaaagtgaacttacaaaatgaaaaatctctggacatcttgcaaacattgaatctgtaagatgttcagagattaagttcaatgccgctggccggactcgaaccggcacggctactaaccgcttgattttgagtcaagtgcgtctgccaattccgccacagcggcttattctgtcggacaagaaaatcttcttgtccgaatcagcttttttatgttaccatatctggtctcatttttcaactatttttttgattttatttacaaagtttctttccaacctcaaagcagtcaaatgttgcaaaataatccttcggtgtctcagcacggcggatcatctgcacacttccgtcctctttcagaagcagttctgctgattttaatttaccattgtagttatatcccatagagaaaccgtgtgctcctgtatcatggatcacaagataatctcctctgttaatttccggaagtattctgtcaattgcaaacttatcattattttcacacagagaacctgttacatcatatttgtgatcgcacggtgcatcttcttttccaagaacagtaatatgatgatatgctccatacattgccgggcgcatcaggttaacagcacacgcatctactccgatgtagttcttataagtattcttctcatggattgcttttgtcacaaggcagccataaggtcccatcataaagcggccaagctctgtgtagattgcaacatctcccattcctgccggaacaagtacttcttcataaaccttgcggacaccttctccgatcacgcggatatcattcggctcctgatccggtgtgtaaggaattccaataccacctgaaagattaataaacttaatatgtacccctgtttctttctgaagacgtaccgcctgctcaaaaagaacttttgcaagcattggataataatcatttgtcactgtgttgctggcaaggaatgcgtgaataccgaattcttttgctccttttgctttcaatgtcttaaatgcttctgtgatctgctctgttgtcatcccatactttgaatctcccgggttatccataatatcattactgatcttgaatattccgcccggattgtaacggcagctgatcgtctccggaatatgtccgattgtcttctcaaggaagtcaatatgtgtaatatcatccagattgatgattgcgccaagtttatcagcaagtataaaatcttcctctggtgtatcatttgaggaaaacataatatcatgaccatcaattccaactgcatctgacataagcagttctgtataagaggagcagtcacaaccgcatccatactctttcaagatctgtaaaaggaacggattcggtgtcgcctttacagcaaaatattctttatatcccggattccatgcaaatgcttcctttaatgcttttgcattctcacggattcctttctcatcataaagatggaacggagtcggatatgtttttacaatctcttcaacctgttcttttgtcacaaatggtttcttactcattttcattttctccttcgcgtattttgattaattctatctcattcgcaagtgctgttttaaacagcgtaacgaaatttctctgtccggaatagacacaagtgtttctgctctcctgtccgtactcacccgaaagtacatatttagaatctgtgatcagaccaatctgatttcctttttctttcgtcacataaatgattgcccctgaaagttcaaatggatgatctgtcacaagaactaccttttttcctttttctgtcagttcctttaactgtcctttcaactgttccagacagacaccggaacaggaacaatacactctttcttccacattagccagaagattatgaatcttatctgaaatatgttcctgaccatcgatcgtaacatatccttcttcttctttctgttctcccgtaagattcatatccaaccacttctgttcttcttccattctgcggattctgttaccacagaactcctgaacatgaaccggaatatatcgcttagcatcctcttctaccagatatgcagcccctttttcaaccagagctgccagtgatgcatacacattcgaccttgagattcctgtatctctcgcaatctcataccccgtctgctttcctgcttcgatcagccgtagataaacagttgcttcctgccgggacattccaaaatgcatcagatattcaattgctttactttcgtccatagcaccatccctctgattagtagttctttacaggaacactatacagcattgattgtcggatgtcaatatattgattgtatttaacgcttgtttttgagaacttttttcattttagattattactcacactgcgcgtgactagtaacgtgtagtcagaattaaaaatgtttaatatgaattacgtaaataagtccagccctgctgttgccatgagcacatgtaaggcaggagcgttccaaatacactttgttcagtatgttaataagagccagaacaggcgcctcgcacggtaactgttctggctcttattaaaagtttttctaatttaatctactgtcacaattctcatcatattacttgtaaagcttctctctttgcttacatttgttgaaggaattccagctgtgataactacaacatctcccggctcaacatactgttttacctgtgccagttcaatcgcattttcacagatatcttctgttgtatcaacttcaagagatttcagcggtcttacgccccagtaaatagacattcttctcagtgttctctcgttcggagttacaccaaggatttcctgtcttggtcttaagttggatacaactcttgaagttgctcctgatacagatggtgtaatgatacattttgcattcaggtttgctgctgccagtacggatgaatatccgattgcactggatattccgcctcttaaatgaccgtgctctttctcaagcatgatatcataatcaaggtgtttctctgtctgctcaatgatatgaaccatcatctgaagtgcctcgagtgggtatttaccctgtgctgtctctcctgagagcattacagcatctgttccgtcatatacagcgttcgcaacgtctgttacctcagctcttgtcggacgtggattacgcatcatagaatcaagcatctgtgttgctgtgataactgtcttgaactgatcgttacatttctggatcatcatcttctgaagatatggaagttcctctgccggtatctcaactccgaggtctccacgggcaaccatgataccatctgctgcacggatgatctcatcgatattgctgattccttcttcattctcaatctttgcgataatcggaatgtaaggagctccgagagacttcagatatgccttgatctcaagaatacactctgcatttcttacgaaagatgcagcaataaaatcaattccctgctctgctccgaatttaatatcttctttatctttctcagtgattgccggaagtcttaccggtactcccggtacattaacgccctttttctctccgagttcaccaccgttgatgatctcacaatgaatttctttgtctgtttttccgattactttcagtccgatcagaccatcatcgatcaaaataatctttccttcacttacatcttctgcaagtcccttatatgtgatagatactttattctcatctccaacaatatcttctgtagtaagtgtaaaggtcttccctgtttcaagcttaatcttctttccgtctttcagaacacctgtacggatctctggtccctttgtatccagaagaatagctgtcgttgcatgctcttcctcgcgaagctctttgagcatatccatacgacccttctgttcttcatgatcaccatgagagaagttgaaacgagctacatccatgccattctggatgagttttctcatcagttctctatcatttgtgtttggtcccatcgtacatactacttttgtttttttcatactaagtcaatctctcctttaaaaaatataaccttaaagttcctatacacctggagcgaagctgcactgtatcactttcggctgcaactctgatctgatacactgcactgccatacctcatctccggtaaactatgagaaatatgcgttacacaattctcattttctacttcacatgttcatgtgtaaataaatgttcctggcaatactcatagtttccattacattttgaacagaaacggaactccaatgtcggatcatcaagttctgtacgtccgcagactgcacaacggtgtcttgccccattcgcataagtcatatgtggtctcgtctgctgtttaaactttgcttttctcgcctgctctttcggactgaaacgcttcatattcctgctggacaggaaaaagataacaaagttcaataaggatgccgcaatcgcaactttcgttgcgagacttcctgtaaagaaatagtacagtgccattgccgcatatacgaaagccatccatttcatcttaatcggtaaaataaaatagagtaaaacttccatatccggatagatggaagcaaatgccaaaaagatagacattgtaatatagttggtgctgatcaatccgatacttgaaagcggaagttcaattccatagataagataaaacacaccatacagtatgaatactgcgatcactgtaaaaagtattcctgaaaaaatgtatacattataacggaatgttccccatgttctctcaagggctgagccaagggagtagtacaataatactagaaacagtaaagaaatcaaacttcctgtcggtggaatcaatacccaggaaataatcctccaaacctgtcctcttaaaatatatgccggttccagtgtcagccatcctaaaagtcccggtgctaaataataaatagcgaaacctatcacatacccggccagcagatacaccgtaagattcgatattgcaaaacgacctaattttttttctaatttatcaagccagttcaactcgtatcctccttctattttcattttatattactgtccactacgtgtggccagcactcatcacatctttgtatagcagtaattgtacaagggaagacttgttttgtcaaacgattgtttttatattaatacacttttaacaagaatatgatattttcctttcctttctacttagacattttgccatattgcagctcatttcttcacacttactacactacaatgaccattgtctttttgagaatcttgtcgtataatgttatttattgcgagctaacaaacgcatttaataggtagtaactcatataaatttgacaaattaactgaattacaaaagattggggatattaattatgaacgcaaaaaatctacatactttaggaatcgacattggttccacgacagtaaaaattgcaattcttaatgatgaaaatgaagtcctcttctctgattatgagcgccatttcgctaatatccaggagacgctttccgatctgctcggtcgtgcgctttataagcttggaccaatccaggtttctcctgtcatcacaggaagcggtggtctgacacttgccaaacacctcggtgttccatttgtccaggaggtaattgcagtctccactgcactacaggattacgctcctcagacagatgtagcaattgagcttggtggagaagatgcgaagatcatttattttgagggtggaaatgtagaacagcgtatgaatggtgtctgtgccggtggtacaggttctttcattgaccagatggcatctcttcttcagacagatgcttccggtctgaatgaatacgctaaaaattacaaagcattgtactctatcgctgcgcgctgcggtgtatttgccaagacagatatccagccactgatcaacgatggtgccgctaaagaagaccttgccgcatccattttccaggctgttgtgaatcagaccatcagtggtcttgcctgtggaaaaccgattcgcggtcacgttgcctttttaggtggtccgcttcatttcctctcagagttaagggaagccttcatccgtacactgaaactggacgatgaacatatcattgcaccgaaccattcacatctgttcgctgcaatcggttctgcactaaactctaagaaagacactccgatggaattgcgtgatatgcagaatcgtctggaaaataaaattcagatggatttcgaggtggaacgtctggatccactgtttgcaacaactgctgattacgaggaattcatttcccgccatgcaaagcatcaggtgccggtaaaagatcttgcctcatacaaaggaaaagcatttcttggaatcgatgccggttcaacaactacaaaagcggctctcgttggtgaagacggaacacttctttattccttctatcacaacaacgacggagatccgcttggtacaacgatcacagcgatcaaagatatttacgatcaactcccggagggtgtagagattgttcattcctgttccacaggatacggcgaggcactgatcaaagctgctctgatgcttgacgagggagaagttgagactgtttctcattattatgcagcatccttctttgagccggatgtagactgtattctggacatcggcggtcaggatatgaaatgtatcaagatcaaaaatcagaccgttgacagtgttcagctgaatgaagcctgctcttccggatgcggttctttcattgagacatttgcgaaatctctgaattattctgtagaggattttgctcacgaagctctttatgcacagaacccaattgatctcggaacacgctgtacagtatttatgaattccaaagttaaacaggcgcaaaaagaaggtgcctctgttgctgacatttcagccggacttgcttattctgttatcaagaatgccctgttcaaggtaatcaaagtatctgacgcatccgaactcggaaatcatattgttgttcagggaggtaccttctataataatgcagttcttcgaagctttgagaaaattgcgaactgcgaagcgatccgcccggacattgccggaatcatggggtgcttcggtgctgctctgattgccagagaacgttatgttgactgcgaaggcacaacaatgctttccattgatgacatccgttctcttgaatactccacaacaatgacaaaatgtcgtggttgtacaaacaactgccgtctgacaatcaaccatttcagtggtggacgtaaattcatcacaggaaatcgctgtgagcgcggacttggaaaagagaaatcaaaaaatcagatgccgaacttatttgaatataaattgcatcgctattttgattacgaacctctttccgaggaagaagcaaagcacggatcaatcggtattcctcgtgtgctgaatatgtacgagaactatccgttctggttcacattttttacaaaacttggattccgtgtcattctgtcaccgacttccacaagaaagatttatgaacttggtattgaatccatcccaagtgaatccgaatgttatccggcgaaacttgcacacggacatgtacagtggctgatcaatcagggtgtaaaacacattttctatccgtcaatcccgtatgaacggaaagaatttgctgattctgacaaccactacaattgcccgatcgttacttcttatccggaaaacatcaagaataatatggacccaatcgtcaacggagaagttgattttatccatccattcttgaattttgaaagtgaagagacgatttcttatcgccttgtagaagaattaagtaagaagttctctctttccgaaagcgaaatcaagtcagcagtccatgacgcatggaatgaacttgctgcctgtcgtcaggatatgagaaataaaggagaagagaccatccgcttcttaaatgaaaccggaaaccgcggtatcgtacttgccggtcgtccataccatatcgatccggaggtaaatcatggtcttcctgagctcattacatcctacaatattgcagtacttacagaagactctgtctctcatttgaatccggcagagcatcctctgaatgtcatggatcagtggatgtaccactccagactgtatgcagctgcaaattatgtaaagacaacggagaatcttgatctgatccagcttaactccttcggatgtggactggatgctgttacaacagatcaggttgctgagatccttacaaattcagataaaatttacacaactttgaagattgatgaagtaaataatcttggagctgcaagaatccgtgtgcgttctcttctcgccgcaatccgtgtgcgtgaaaagaaacaggaaaaacgtaccattcatccggcctctatcaaaaaggttacatttacaaaagagatgcgtaaggattataccattctctgcccgcagatgtctccggttcatttcgaactgcttgagcctgctttccgcgctgccggatacaacattgatgttcttcctaacgataacaaacaggctgtcgatatgggactgaaatatgtaaataatgatgcctgctacccttctctgatcgttgtcggtcagattatggatgcactgttatccggaaaatatgacttaaatcatacagctgttatcattacacagactggtggtggctgccgtgcttctaactatattggattcattcgccgtgcacttaagaaagccggcatggaacacgttccggtaatctcacttaatttaagtggattagaagataaccctggatttaaactttctcctgcactggttcttcgtggaatctacgcagcagtattcggagatatctttatgaaatgtgtttaccgtatgcgtccttacgaggccataccgggaaccacagataagattcaccgtaaatgggctgaagttgttaagaagtttgtatccgaaggctatccttcccgtaagagattcaagaaactttgtaaagatatcatcaatgattttgataatatcgagacactcgacattaagaaacctcgtgttggaatcgttggagaaatcctggttaaattccttccggctgccaacaatcatctggcagagcttcttgaaagcgaaggggctgaggcagttgttccggatcttcttgatttcctgctctactgcttctacaatcagaacttcaaagtttcccacttgggaatgaagaagtccaaagctacagctggaaaccttggaatcaaagctttggaatggttccgtgctccggcttccaaagcatttgcagaaagtaaacactttgatccgccggctcacattgaagatcttgcaaaaatggcttcagagatcgtatctctcggaaaccagaccggtgaaggatggttcctgaccggtgagatgcttgagcttatccacagcggtgcaggaaacatcgtctgcacacagccattcgcctgcctgccaaaccatgttgtcggtaagggagttatcaaagaacttcgccgcagacatccggagtcgaacatcgtagcaatcgacttcgatccgggcgcaagtgaagtaaatcagttgaatcgaattaaactgatgctgtcgacagcgttcaaaaatctggagaaataaagatttatcgtagggattctttttcgagttcggacgaaatcagatatcgcatataaagtttattcgaacagacagacatcgagggtttgattcaggctccgggttctgtatacaggaaagactaagaaaaacgaaagattactaaaaacaaagcagtgctcggcaaactcgctgccgcttcagacagtagcctcgcactgctttaacgtaaccttttgttttttaagtctttccaagcacacagaacagtcacctgaatcaaaccctcgatggctgtctatcagtaagttcttcagcgctatctgatttctactctctcgaaagaagaactctacttgagaagcaggcgcaacggaaattctatagaatgatatccatatctcaaacgtttttgcacctaataaaatttagcgttgaaatcgattttttcaataaacagaaaacagaaaatatgagcttcgaggagctttatgttagaagatgggtatagggacgtagatgaatgtggagcatgcttgctcatacttaaaaaacaatggattgcgttaaagaaaggattgacagctgtctgagcggcagcgagtttgtcaatcctttctttgcttttagcaatctgttgtttttcttagtatgaacagtatgcgtaaccctgagtcgacgttcctatatccatcttctaacaatcaactctctaaaataatattttcagttttcgtccgcatatccgaaaaacaatctctacgtcaaatttctatttgcggtacaagtagaggattcctccgaaaagccccaatataatccctgcatatccgccaacgcagatgatatctgacagactttgtacaagattgattcgaatcacagagcagactcccattccgagtactgttcctataatcgtccagcctacgatcagaattggcagatacactgcaagtgcatgctctttatctatatattgatttacaaaattccaaagttttccatacataaaaattaccctctttctactaaaaatgtctgagtattttttctttgacaattattagtatagagggtatttgtaaagtctcattttcttccaatgctaaatctatgtaaaataaatcagccaaatgttaaatctgtttgctttatacctttatgatgttgccagaaccagttctaccacttcctgcggtgttgttgccagtgcatctgcgcctgcctgcgagagttctttcaaatctccatatccgtacagaacaccgattactttcagaccttccgcatggccaccaagtatgtcataagaacggtctccgaccatcacgatcttatccagttctttttcttcgcactgttccaaaacataatggataacatcttgtttttctgtacgtgtctcatccatacatgccccgccgatcacatcgaaatattttgcaagtccaaagtgatctgcaatgatttttgcaaatttttccggttttgatgttgccattgcaatcttgatgcctgcttctttcagtgtctttagcatctcttctacgccatcatacacactgttttcaaaaatacctgtcactgtgaaatattctcgataaagagtaaccatctctgctgctctttcttcgcttattccacaatgttccataaactggcctttgagcggaggaccgataaatttacgcagttcatctgtctttggtaccggccctcctgccttctctaatgcatattttacggaattcataattccgggacctgaatctgtaagtgttccgtccagatcaaataatacagttgttattttcatttccaattcctcactctattaaaattttctaatctgatcatcctcttcactttcagttttgatcactttacgaatcaccacataatagccaaaatcatcgttcactttaatatagactctttcgccttctttatgtccgagcagtgcttttccgattggtgattctatactgatcagtccattcaaagaacttcctcttacagaagttacaatacgatatgtctcaacttcatcgtcatcttcacaataaagttccacagtattattcaagccaatttcatcggatttggaatgatcctccacgatttcagccgtctttagcatcctctccagataacgaatgcggctttcgttctgatttttcgctttttttgctgcatggtattcaaagttctcactcaaatctccatgagctcttgcttctttcaccgcttcaatcagttctttacgttctactaattttcgatgctcaatctctgcctgaatcttttccacatcattttttgtcaatctttcacgcatgacttttcctttcttctctgaaccataggttactgttctcacgatgtgcgaccagcaacgcatctcgacattttaaatcgcctttggcgatgggactactttgaacagtaatctatagggaaaaggaaagctatcaattacgataaactaaaacaaacactgttgttatcgcagtcaatagctttccctttttacttctatcttaattcacgcaattttctttcagattcatttcttttgaagtaatcattcaagttacctgaatcaaaattcaatgaccatgaattattttgtcaacagagattttcctgtcatctcagccggctgctgcattcccatcagctcgatcagtgtcggagcgatgtctgccaggcatccgccttctcttaacttgtaagccggatcagcatttacaaggataaacggtaccggatttgttgtatgagctgtgaatggctcacctgtctcctcgtcgatcagctgctctgcatttccgtggtcagcgcagatgaacatctgtccgtttacttctttcagagcctctacagcctttcctacacactcatcaactgcttctacagccttgatcgcagcttcctgaacacctgtatgtcctaccatgtcagggtttgcaaagttgatcacgatcacatcatagttctcagacttgatcgctccaacaagcttgtcacatacttcgtaagcgctcatctccggtttcaggtcataagtagcaaccttaggggatttcacaaggattctgtcctctccctcattcggctcttctactccaccattgaagaagaatgttacgtgagcatatttctctgtctctgcaatacgagcctgtttcagtccgttatctgcaaggaactgtccaaatgtattcgtaatagattcttttacgaatgcaaccatcttattctcgattgtagcatcatactctgtgaaacatacaaatgtagtcttcactctagctcctctttcgaatccgtcaaagctgtcatcacagaatgttcttgtgagctctcttgctctgtcaggacggaagttgaagaatacaacggaatcattttctttgattgttgctgttgcagcaccgtcttttgttacaacaaatggtactacgaactcatctgttacatcctcatcgtaagaagcctggattccagctgttgcagactctgctgtattgccttctcctgcaactaatgctttgtaagctttctccacacgatcccaacgattatcacgatccattgcatagtaacgtccggatacagatgcaacttcacctacaccaatctctttcatctttgcttcaagctgctctacatattctttacctgatgccggtggtgtatcacggccgtcaaggaaacaatgaacatatactttctcgattccctgtctcttggcgagctcaagaattccataaatatgagtaatatgactatgaactcctccgtcagatacaagtcccatcaggtgaagtgcagaatcattcttctttacattctcacaagctgcaagaagagctttgttctcaaagaattctccgtcttcgatagactttgtgatctttgtaagttcctgataaatgatacgtccggcacccatattcatatgtcctacttctgagttacccatctgtccatccggaagaccaacagaaagtccgctggcatttccctttacaaacggatactctgccatcagtttatccataacaggggtattcgcaagagctactgcgttaccctctgtcttatctcttaatccatatccatctaaaatcattaatacggttggttttttgctcatctcaatatctcctttgcattaagattgtctattttttaactctacgctttattgtactagttttagcacaattttgcaagtcagagctttggtcaaatatatctgaaaataagcagattttcgcctgaattcatgtgaaaatcactacaataaaatcttatagtgtcggaagcaattctttcatcagcttcacaccatgaacgatcgcctgtttctcaaatgtaggatagtccacctgtgcacttccatctgccttatctgagattgcacgaatgatcacacatggaacgtgattcagatatgcaccgtgagcaattgctgctccttccatctcagcacatttcgcaccaaaattattaacaatacgttcttttacttctttttcagaaataaactggtctccgcttgcaactcttcctgtaaatgtacgaatatctgaattcgcctttttatttgcttccactgcttttctcacaagttctttatctgccggaaatgcaaatacatccatacgcggcacctgtccgacaggatctcccaatgcgctgacatccatatcatgttctactgcatctgtagatacaacaatatctccgatattgatctctgcatccagagaaccggctacacctgtattgatcagctgatctacctgataaaagtctgcaagaatctgtgtacaaattgcagcattcacctttccaattccgctctgtacaacaactgcttcttttccataaagcatacctttataaaacttcatggatgctctctcctgcatctcgcattctgtcatatcctcgatcagctcacggacttcttcttccattgctccgataattcctaccatagcttctcaatctcctatcttttctattcccttttcttagttgctttattttcttcattaagctgttactttattttatcaatctcctctatgatacactcaaatgattttcaaagtcaagaaaaaaggccatccggtcagaattactatctctattgctactgtccgcactacctgtgcccggcaatatagatatctttctgaccagatgacctttcttaattatctgttattataaaacagctttaagatcttattatttgtagtttacgatctttccgaaatcagccttaagggaagctccacctacaagacctccatcgatgttagcctgtgcaaaaagttcaggagctgtagctgcgtttacagatccgccgtactggatacggattgcttctgctgtagcttcatcatatacttcagcgatgcaagcacggattcctgcgcaaacttcttcagcctgctctgttgtagctgtctttcctgttccgattgcccagattggctcgtaagcgataactgctgtcttagcctgatctgctgtaacaccctggaatccaaccttaacctgctgacggatgaagtccattgttacgccctgctctctctgctcaagagtctctccacagcacatgattggtgtaataccatgctcaaatgctttgaggactttcttattaacatcttcatttgtctcaccgaagtaatctcttctctctgaatgtccgagaacaacatatttaacacctgcatctacaagcatgttcggagaaatctcacctgtgtaagctccactctcctcgaaatacatgttctcagctccaacctggatgtttgttccttttgcagcctctacaactggtacgatatcgatagccggtacgcagaatactacgtctacttcttcgttagctacaagtggttttaactcctctacaagtgctactgcctcgcttggagttttgttcattttccagtttcctgcaataattttctttcttgccattgttcttttctcctttagaaatctctaaatttatacacagagaagctgtcacaatcagcttctcatgcatacgtttcatattatttatcgttagctgctgctactcccggaagttcttttccttcaaggaattcaagagaagctccaccacctgtagagatgtgtgtcatcttgtcaccatatccgagctggttaacagctgctgcggaatctccaccaccgatgattgttacagcatctgtgttagcaagtgcttctgcaactgcctttgttccatcagcgaatttcggcatctcaaagcatcccattggtccgttccatacaactgtcttcgcagatttaacagcgtctgcaaacatctcagctgtctttggtccgatatcaagtcccatccatccttctgggatctcattctgagctactacctgtgtatttgcatcgttagagaaagcgtctgctgctacagcatcaactggaagaagaagttttacacctttctcttctgctttcttaaccatgtcaagtgcgtactgtaagtaatcttcctcaagaagggaatttcctacgcttccgccctgagcttttgtgaatgtgtagcacattccaccaccaatgatcagagtatcaactttgtcaagaaggttgttgattacagaaatcttactggatactttagatcctccaaggattgcaacaaatggtctttccggattctctactgcatttccaaggaaatcgatttctttctgcataaggtatccaacaactgctgtgtcaacaaactgtgtaacacctacgttagaacagtgtgctctatgagctgttccgaatgcatcgtttacgaatacatcgcaaagagaagcaaggtctttgctgaatgcttcaccgttctttgtctcttctgctctgtaacgtgtgttttcaagaagaacaacatctccgtctttcatagcttcaacagctgcttttgcgtttggtccaactacttccggatcagctgcaaatttaacttcctgtccaaggagctcagaaagtcttactgctactggtgcaagtgaaagctccggctttggctctcccttcggttttccaaggtgggaacaaagaattacttttcctccatcagcgatcagcttcttgattgtaggaagagctgccacgatacggttctcatctgtgatctttccatcctgaagcggtacgttgaagtcacatcttacaagaactctttttccttttacattgatatcatctacggattttttattaagtgctgccatttttcatagcctcctgtatcttgtctttttcctgatcgtctcataaattccgtgtgaattatcaccagcagatatttaacgatcacattaaaaaggatccggtcctacaataagaccggaccccattgtgagtcaataattcagattaattctgagtatttaatataaaattaagcctcaagaagtgttccgaagtgtttgattgttcttaccatctggcttgtgtaagagttctcgttgtcataccatgaaacaacctgaacctctgttgtaccatcaccaactggaagagccattgtctgagttgcatcaaacagtgatccaaatctcattcctacgatgtcgctggatacgatctcatctgtgttgtatccgaaggactcgttagaagctgctttcatagctgcgttgatctgatctacagtaacttctccctcaactactgctgtaaggattgttgtagaacctgttggtgtaggaacacgctgagcagatccgataagttttccgttcagttctgggataacaagaccgattgctttagcagcacctgtgctgtttggtacgatgttaactgcagctgcacgagatcttctaagatcaccttttctctgcggtccatcaagtgtcatctgatctcctgtgtaagcgtggattgtacacatgataccggacttgattgctgcaaggtcgttaagagcttttgccatcggagccaggcagtttgttgtacaagaagctgcggagatgatgttgtcctcttttgtaagttcttcgtggtttacattgtaaacgattgtcggaaggtcatttccagctggagcagaaataactactttcttagcacctgcatcgatgtgagcctgagcttttgctttggatgtgtagaatcctgtacactccagaacaacgtcaacaccgatctctccccaaggaagctcagctgcgttagcttttgcgtagatcttgatctcttttccgtcaactgtgatagaatcctctcctgcttctactgtatctgcaagagcgtatgttccctgagttgagtcatattttaataagtgagcaagcatcttaggagatgtaaggtcgttgattgctactacctcatatccttctgctccgaacatctgtctgaaagcaagacgtccgatacgtccaaaaccattaatcgctacttttactgccatgattaattcctcctaaaaagtttaaaaaatttatggctgtatctccagccatggcgatgaatttaacaaagcgataattgttaaatattcatcaactagattcattgtactaaaacaagaacaaaaattcaagccttaaatccatataattctaattttatggaacaattctcctaaacaccggtttccgccccttaaattctgcataataactaaaaccacagcctgcaagtatctctcctgcctgctcatagtcaaaagctacatgttccggcctgtgtgcatctgctccgattgtgacaatttcaccaccaagctccttatatcttctgataacatccggatgcgggtttggaaatccaagtccatatttcattcctgccatgttcatctcaagtccttttccatgactgatcagatgttttagtatctcatcgatctcttctgcatattttctgtaagaatattcttctgcctgatgtgcgccataacggacaacatagtccaaatgtcccaggctatcgaaggaatttatttttttcaggttttcaattgccacctgaaatgcttcatgataagcctcctcatcacttcgtccttcaaaaaatccacgataatacggatcctgtccatggataaggtgtattgaaccgatcacaaaatcaaacggatatttttctgtcagttctttataatattctcccaggtgtggctgaagtccgatctctacaccaatccggacttccagtttcttctgatattctgtttttaattgcgtcagtctgctgaaatattcatccaggtcgaacataaatgcacccgccggaaaatccggtgtttccggaaagtctttatcaagatgatccgtgatgcagactgcctgcattcctttattcaccgctgcatcaagcatggaatgtacagatgcatcactatcttctgaaaatcttgtatgcatatgcgcatcacatgctatcataatattgtgccgcctcctaatacatactcaccatcatagagaacaaccgcctgtcccggtgtcactgcacggattggttcatcaaatgtgcaggtgatttcatcttcccctgtcttttccactgtgcaccaggctcctttatgattgtaacggatctttgcaaacacccggatgggttctgtgatatcttctacactcatgaaattcaattcattcgcacgcagcgtatgcgttaaagattcttcgtatgttccaatcacaacttcatctgtttccggacgaatctcaagtacaaatgccggatatcccagcgcaagtccaagccctttacgctgccctaccgtataatgaatgattcctttgtgttttccaagaatctttccgtccggtgttacaaaattcccctgacggatcggagtatctgcattttcttcaataaaggttgcataatctccatccggaacaaaacagatatcctgactatctggcttgttagcaacctgcagtccaatttcttctgccatctcacggatcttatcctttgaataatttccaaccggcatcagcgtatgcgccagttgctcctgagtcaggttataaagtgcataagtctggtctttcgcaagcgtcgcagatcttcggattgcgtatcttccattcggaagtttatcaatcctcgcataatgtcctgttgcgatatagtctgctccgatggaaagacttctctgcaaaagtgcttcccatttcacataacggttgcaggcaatacacgggttaggtgttcttccgttcaggtattcttccgtaaagtaatcaattacatttttctggaattcctgtttaaaattcatcacataatacggaataccaatagacgatgcaacacgtcttgcatcgtctaccgcactgagcccgcaacagccgccgttttcttcttgaacctcattgtcctcatcctgccagatctgcatcgtcacaccgatcacatcatagccttgttctttcaaaagccaggctgccacggaggaatctactcccccggacattccaacaacaactttgcctttgctcattaatattcctcttcctctgcttcttcaccttcgtgaatatctgacttcggtttctgaagtccctcaatcttgataccgtgtttctctgcataatcccagagtgctgcatggattgcttcctctgcaagaagtgaacagtgaacctttaccggcggaagtccgtcaagagcttccataacggctttgtttgttacctccattgcttcctgaatgctttttcctttaaccatctctgttgccatactggaagttgcaacagctgctccacacccgaatgttttaaactttacatcacgaatgatctgattttcatcaatatcaagataaattctcatgatatctccacatttcgcatttcccactgttcctacgccacttgcattttcaatttcccctacatttcttggatgctggaaatgatccattaccttttctgtatacattatataattcctccattttgtttatctttttattcaaaaattagtttgtatttttcttttaagtcattctggcttatgcattcttctgctgctttttcataaaatcttcgtaaagcggagacatactgcgcagatgtgcaacaatctctttcaactggtcgattgtataatcaatatcttcttttgttgtatcagcaccaattgacatacgaagtgaaccatgtgcaatctcgtgcggtaatccaattgccagaagaacatgagacggatccagagagcctgatgtacaagctgaaccactggaagcacagattcctttcatatccagcatgatcagcaaagattctccttcaacaaattggaagctgaagttaatgttattcggaacacgtttcacacgatctccatttaatctacaatatggaatctcattctcaattcttgcaattgcataatcacgaagttctgtctcatgtttcattctctgttccatggaagccatagcaagctctacagcttttccgtatcctacaatacccggaacattctctgtacctgcacggcgttttctctcctgggctccgccgtgaataaatgaacggatcttcactccttttctgatataaaggaaaccgattccctttggtccgttcagtttatgtccactggaactgagcatatcaatattcatctcatctacattgatcggtacctgaccaaacgcctggacagcatctgtatggaaaagtactccatgtttatgtgcaatctctccgatttctttgattggctgaatacttccgatctcattgtttgcaaacattacgctgaccagaattgtatctggacgaatcgctgcttcaacagcttccggactgacaataccattctcatctacatccagataagtcacttcatatcctctcttctggagatattctcctgtatgaaggattgcatgatgttcaatctttgttgtaatgatatgttttccctttgattcataagcctcagctgtagctttcagcgcccagttatcagattcagaaccaccagctgtgaaataaatctcctctgtcttcgcgccaagtgcttttgctatgatttctctctgttttgtgatcacttctttattcgcagccgcaaaaccataaacactggatgggttgccaaaatgctctgtaaaatatgggagcatcgcatccacaacttccggtgctgtctttgttgttgctgcattatcaagataaattaattttcccattacctgttacctcacttttattttatctactttgttttcttactgttcacaaataattgtagacaatgattcttttcagtttttacactttgtataatccagatgattgtctgtatgtccaagacatttactttctgtcaccagttgattcagccagatttcatctactgtctggttaatactatcattgattcgtttccacacatactttgtcacacagctgtccgcgcctttgcattctccttccggatcaagtccggcgcattctactggttcaagattcccttccagtgcacgaagcacatctcctacagaaatatcttttgcttcctttgctaagacatatccaccatttgcacctcggatgctcttgacaagtcctgcttttttcagcttcgacatcaattgttccagatatcgttctgaaatatcctgacgtcttgcaatacttgtgatggaaaccggagaatcttcactgtattgggccagatcgatcaaggcacgcaatccgtatttcccctttgttgacagtttcacatcttcaccttctttttcttttccttttcctagtattatgctagggtttccttttgtaggatatcactagtcttacgttctgtcaaggatgtttcttgaatatgttgtttaaaaataagttcatttctggttactgtccgcgttgcacgtggcagcaatcattttgacatgagggtattatgtttagaaaaaaacattctttgattaaaggaacactgattctcacatctgccggtcttgtaagccgcgttctcggattctttttccgtattttcttaagccatacctttggagaagaacaggtcggactttatcagttaattttccctttctacgcactctgcctgtctttgagtacttccggtcttgaaactgccatttccagaagtgtctctcgctttcactcccttggccgaacgcaggacggaaagttgattttccagacaggtctgattctttctgttctgatttcactgatttgtacttttctggtacagaagaattccgtttttctttcaaatcgttttcttggagatccaagatgtgcaacactattatatctgatcgttcttgcacttccggcggcttctgtccacagttgtatctgtggttatcactatggtctgcaaagaacctctgtcccggctatttcacagttactcgaacaatttgttcgaatttcttctgtttttgttttatattttatttttatacacagtggagttcaccctgagattccattggctgtatcaggtattattttcggagaacttgcagcagcaggctactcgcttttttcactgaagaagaagggttttgatgctgattctccatatattctttctatctcaaaatcttgttctgaattgctacgcctctctgttccattgacagttaatcgcacagcaattacattcttgcagggaattgaagcagcttcaatccctgtctgccttgagcttgcatctcacagtgcttctgaagctctcagtatttatggggtactgaccggaatggcattaccatgtatcctttttccctgtgcactcactaactcagttagcctgcttttaattccagcggtcgcacaaaagcaagctgaaagctcttcaaaagagacatttctccttataaaaaaggctgccggaggatgtttctcccttggtcttctgtgttctgtcttctttcttcttactggatctttcctcggaaatttcttatttcacagtactttagccggcaatttcatcgtaacacttgcctggatctgtcctttcctgtacacaagttccgctcttctcagtgcaatcaatggactgggacttacaaccctgacgctgatgatcaatcttcttggattatccatccgcattcttagtgtatattttggaatccctcactatggaatcacaggatacctatgggggcttttcatcagtcaattagctgtctgccttgttgcattacttacactttcccacgaaatcaaaaaagaatatttacaatcttttgaatcagccacggattaagacaggactctgaaaaaatcccaattaaaaacaaaccgcatacaaagaacgttttttgtctgttccactgattctgtggatagttccaacaaaagcgcaaaagcacaagaactgccggaacataaaaaaggaactgtggaaatagtcctgccacacaaagaatacttcccttcattcctaattctgctactgcctctgacaataaaattcctcctgacatccccgtccacagaagaaaaaacgctgccacaatttttctgatccggattcccatcgccaaaaacagcatcaggaaaaagactccccgtacccgaatcaaataccaaatgtactgttgaaaagatatcgtctcattctttaatctcataagataaacttctgtaaaagttccgatcagacttagctgttctccccatatataattgacaatcaagattcctgtcaaaaagcctgtaaaaaacagagctagaaagtaatgtcctgtacgaaatgccttcacaagtattcctcccaccctataaaaatgttctgcggatatatttttatcctcaatcttccacaccattatatgagtgtctagtttttctcatgcggcagcaatgctacttattgccggcattcaatcattttccatactttacagcataagccatcaaagaagaaactgtcttcgcatcttcaatctcacctgaaaaaatcttttccttcaattcttctattgtataagcgccaagttcaataaattcatcttcatctaaatgctgttttgacggtatcagatcatgtgccacataaacttcaattcgttcgttacaaaatgctactgttgtcctcaaggtgatcagccactccagattctcgctgcgataccctgtctcttcctctaattcgcgagacgcacactctataccaggttctcccacttcatcaagtgctcctgccggaatctccaatgtatatcgatccagcgcatttctatactgtctcaccatcaaaatcttaccatctgctgtaaccggaactaccgctgctgctcctttatgacctataaaatcccatactacggtgtgatccccgtccacttctatcgtgtcctgataaaagtcaagaatctttcctttaaatttcaattctctgttaattcttttaatcttctcgctcattctgttctcccttcttttaccttacatcaccgtatgcattctatatcaaaaatttttacgcttacctgtaatagctttctcagtaaactaaaagcccctgtctttcgacaagggccaactttcatcttctgttatgattctcttattttgcgtaatctgttgctcgtgactcacgaataacatttactttaatctgtccaggatattctaattcaaactcaatctgttttgcaatatcccttgctaaaagcaccatatcatcgtcagatacctgctccggaactaccataacacgaatctctctacctgcctgaatggcaaaagacttatctacacctttaaactggttggtaatatcttctaactgtttcaatctgtttgtatatgtctcgatggtttctcttcttgctcccggtcttgcagctgaaatagtatccgctgcctgaacaacacaagcaatcagactctgcggttccacatcgccatgatgtgcctccacagcattaataattgttgctgattctttgtattttctacaaagatctgaaccaatctgaatatgtgatccttctacatcatgatcaattgatttaccaatatcatgaagaagtcctgcacgttttgcaagtctgacatccagtccgatttctcctgcaatgaggcctgataactgagccacttcgattgaatgcttcaatgcattctgtccatagcttgttctgaacttcatacgtccaagaagacggatcaactccggatgaattcctgtaactccaacgtcaagagctgcagcttctccttcctcgcggatcattgtatccacttctttctgagctttttcaaccatctcctcaattcttgctggatgaatacgtccatccacgatcagacgctcaagtgcaattcttgcaacttctcggcggattgggtcaaaccctgataatacaaccgcttccggagtatcatcaatgatcagttccacaccggttaatgtttccagtgttctgatatttcttccttctctaccgataattcttcctttcatctcatcacttggaagctgaactacagaaattgtagtctctgcaacatgatctgctgcacatctctgaattgcattcacaacatactcttttgctttcttgtcagcctcttcctttgcctgagtttccagttctctgaccatcttggctgtgtcatgcttgacgtcatcttcaacagtttttaacagatattcttttgcctgttcggaggtaagtcctgagattcgttccagttcctgcacacgtttctggctaagttcttctactttggcttcacgctggcgaagatgttcttccttcgctgtcagtttgttctcacgatgttccagtacatctgaccgtttgtcgaccgattcttctttcgcgagtacacgcttctcataacgctgtaactccgctcttctttctttcgtctctttctcaagttcattctttgtcctgatggactcttcctttacttccaaaagagattccttcttcgtcgtctctgcagtctttacagcatcgtcaatgatttctcttgcttttgcttctgcattcccaatcttgctttccgcattctttctcagattggaaactgtaacaaagtgagtaatgattccgactatcaacgcgagggccacggcaacgcctataaataaacctagacttatctgcacaggagcacctccttattcgattttcattgtacatattactcaaatacaacacttaaattttatactgtttcaacaacaatgtcaagcattgtaattattattttgtatcacatgacacaccccgggttactgttcactcccgtgtcagttactctgtttatcataatctgatataacatgacggatcacttcataacgaaatccttttcgtgcaagatatcctaatatcttttgatattcctgctcttccattctttccggatcaaccttcttttttcgcagtatccttcggattgcctcttcctctgaatcttcactatagcactgttcaaaagccagacaaatcaaatcatcagaaactcccttctgcgacagcagtgccttgatttcccgtttgcttttactatctttgcggctcataacaaaattttccgcatatcttgcatcatctagatatccaaaagatctcacatattcaattgctccgctgattgcattctccggatattgtcccgccttcagttttttccttaatgcagactctgtacgatccatatcctccagcaaatgcattgctctcttctttgcgcgtttcaacagtacctcattctgaatcttttcataattttcctgcgtgagatcttctccctgctttataccaaaacgcttcaactcacctttataaagcacaaatgcaaatgttccatccagatatactttaaacttcgtctttgtctgctcctctatcccggtaacaatcattctttcttttctgcctcatcagccgctttagaagccggtgtcagcttcagatcactcgatgctcctgtcttcttctcagcatccggaagctccttctctgcttcttctgacccggataatgcataatgtgctctcaccttctgatccagtgtctccatcacttccggatgtgattccagatatgcctttgcattctctcttccctgaccgatcttctctccctcatatgcataccacgcaccactcttcttcacaagatcaatattggttgcgagatcaagaatatctcccgcacgggaaataccttttccaaacataatatcaaattccgcttctttgaacggcggggcaatcttattcttcacaatacggattcttgtacggtttcctaccatctctccactctgctttaaagtctcgattcttctgacatccatacgcacagatgcatagaatttcagcgcacgtcctcctgtcgttgtctctggatttccaaacattactccaactttctcacgtagctggttaataaagatcacaatacagtttgacttgctgataaccggtgtcagctttctcaatgcctgtgacatcaatcttgcctgcagaccaacatgactgtctcccatatccccttcgatctcctgttttggaacaagtgcagctacagagtcaatgacaataatatcaatgacccctgaacgtaccattgtctctgcaatctcaagggcctgatctccactgtcaggctgtgaaatatagagttcatcaatatctactccgatattctttgcgtatacaggatccagtgcatgctctgcatcgataaatccggcaattccgcctctcttctgaacctcagaaatcatatgaagtgcgacagttgtcttaccacttgattcaggaccataaacctcgatcacacgtccctttggcacaccgccaagtccaagtgccagatcaaggctcagacatccggtaggaactgtctctacagctacatgcgcccctgattctcccagccgcatcacagcacccttaccaaaatctttctccagctttgcgatcgccgcatccagtgctttcttcttctcttcgttattcgccagctttgtaacgctctctttgcctgccataattttctccttctctatctctcttagtgtataaaacctattctctctttttcgaacagttgttcgtctatgaatagattttattatacttctttcaaaatgtcaacaataattcttccccttgattttgttgcaataatacgatataccatggaattctcttcctgaaacagaagaattgaagttcatgtgaatcagtgccggcttaaagatctgccggccagacaactaaagaatagcataaggaaaggcagaatgcaagtaccacagcacttacattccgccttttatactacactgcgttactgttcacacaatgtgagaccagcaacgcatctcgccattttaaatcgcctttggcgatggggcgagatgcattcaagtcaaaacacgcatcctccgtgtcaatcagcggagtgattgacacgggagtgaacagtaactacactgctttccagtgtttcacttcttctttgtaaaagataattccttcccggataattttgaatccactgccttcaagttccgcaatcgtaacagaacagtttggcggtacttcatttttccagaaatgttctacggaaagactacctctcatcctgttcagcattgctgtcatcgcagcaccatgtgtagaaatcagaagattcttatccttcagcttcttactctcttcaagactctttaaaaactctccggttctctcataaagttgttctacactttcagcatcttccggcggaatataatttcctgtatcctgaaagaatttctggaatgcaagattctcttctttcgtcttatctacacaggacattccctcatacgagccaaaagaaatttcctggattctctgatcttcataaagcgaaatgttgcgtccctcaagaagaatctccgctgtttcttttgcacgccgcaagggactggtataagccagatcaatctggtattgtctcatcccataagaagtttcccgggcaagatgacgcccatattcatttaagggaatatcctttcgtccctgtaccagttttttcttgttccaatccgtctctccatgacgcacaatatatagcctcactgctgcctacactccctcttcttatctttttaatatttctctcctgatatatctgtaagtagtttcctcgccttcttccgcaagcatatgaagcagtttttctaataattctcttgtatctttatgcatcagttcatctgcacgtccgttctcataataagcaagcggtgcatcagaggtatatgcatccccgagatacactttacttgctgcaatgcggtcaagaaacatctctactacatatctcaccggcatcttcattcccgccagaaggttcggtccctccagactataatcaatccagtattcataatggtgtttgttcctgcctttgtggtggagccatgcggaagaataccctttttcttcccgttcggcattattagggcttcttgtcccctgatagtatctgcatcccacacggaattctgtccaactgtattttgacatatcatggagcagtccctgtttgtacaaaccaacacgaaaacactcttttaagactagttttttgtgttttgttatggtacaaaaatgtgcaaatgccttcatacttttccctctctagccggctgttcttctttacaaagttcttctgcttcctgccgtttttctattttatttacattctgcgtcttaactgtataaatcggtttcttttctgaacgactcttcttttcctctatcctacgtccaaccagaattgctacgctacgttcttccagtaatacatctttctgattttccagctttttcgcttcacaaagcacgccatcttttgtagtcataacaagataccattctacgttctttccaatcgatggtattgcgaagtgatgcggcagccaatgcatattatatgctataaaacaagggaactccccttctttcgttcctgaatacaagacacctaactgacggctggaaacttctgcttttacctgccatgcattttctccatggtaggatacgtccggtatgccacatctcgtggtatccattccggatagtgctgtactctggtggagacaacgatgttcttttctcagcccgatcagtttctttgtatactgaaacagccagtcatctttcttcaactgtgtccagttcacccatcctgtctcgttatcctgacaatatgcattgttatttcctctctgcgaattacagaattcatcccctgcaagaaggcatggagttccctgagccgtcaacaggagttctaatgcattcttcacctgattctttctaagattgacaactgcgcgttttctgcttggtccttctgctccgcagttccaactgtaattatagtctggtccatccaggttcttctctccgttttcttcgttatgtttacaatcataagacactaaatcccataacgtaaatcctgtctgtgttgtaatataattgcattttccattttccgatgaacgatttttcaatgcccagatgacatcattgaccatattctcgtcaccttttaagaagcgacgcatcacattctggaaaccatcatctttctgcatcagcttgatatctttcaaaaacggatcttctatcagctgctcccacggtacgttataaggattcagaacaaatccatccacatgatactccagcatataaaagcgtagacattccgttacataatttgctgatattcccggaacaaatggcatctccagtacaacttctatgccctgactatgacatgcacgcaccatatctttcaactcacgaactgcacttttcccatatgcataggcttttttaggggcaaaataaaaacctttaccatatccccaatagttcacttttgtttttccgcactcttcaaattcatagaccggcatacactgaatctggttaactccaagttctttcaaataatccagtttttcaacaaccccctggaatgttcccttatgcaccactttcgaagaagaatgttttgtaaatccacgcacatgtaaaccataagccactacatcttcccatggaagatgtaggcgctgatcctcctgccagtcatagtcctccattgaaataattttcccacgaatctgatgttcctgaagttttcgttctacaccaaacttctcttttcctgcaagttcttttacatatggatccacacatactttcccatcgatcagaaaattgtattcatatcgatctgctttcagaccttcaacagataagaaacgtacttctccaacaccttcttcctccggcatgtcaaactgatattccggaacatctttccctctcttatacagtagaagttcacatgtcttcccttttgctacctgaacggcaaaatttatatttttgcctttgatatccactccaaatggctgtggactcccctttatcttcctcatagttaacccctttcttgagcaatcaataaattactgccatccatctgttccatacatttcaacattatcacgatttataaagaaagtttcctcacaattatccttctcgtaatccttgcctgccagtaatgctgtcgccacctttactgctgtctttcccatattgatcggggactgtgctccaatcccggtcattcctccagtgccattcaccagtgctgtttttgtcgccggggaaccatccacactatacacgcagatattcgttctctgcgcttctgtgattgctgccatcacctgttctgccatcggatcactaccacacattacagcatcaatctcactgttttcgctcagaacctgtgtcatctcgtccttcacattgctgctgtctcccaacgactcaattctttttatcacttcgaagccactgtttgctacagcttcttcaaatccggtaattctctcattcactgagttcaccccagggctttccacaatcacaattttgccgccatctggtttctggactagaagatcctgcccgcacacatatcccgcattctcattatctgaccctacaaatgcagatacaaggcttgtctcttttacttctgtatcaagattgatcaccggaatatctgcctcttttaaggcttcaagtgcgggagtgattttctcccaatctaccggacaaagaaatactgcctgtaccccttcgttgatcaactcccgaatctgttcattctgcaaatcagcatctgatgccggatcacgaaccatcagacggtcaccttgagcctctaatgctgtctggacagaatttttcaatgtgtcataaaaaggattcgacatatcaatcccactaaatccaaacagtctgccaccttcccctgtattatcatttttcttatcatcctcttctactactgcattatcttccggtgttccaacatttttctttccacatccaagtagtgctgccgctatacacaaaactgccactgtacacagtatccatcttttcttcatattgtctattatcctttcacttctatcagtaacacttttattctaccttgtttaacccgaaagtcaatcttatcttgcttttttctcccctttttgttaccatcaagatagctgatcattctcgttttgagcacctggctggtcaatacggaatgaaatacaacacagattcaaaggagaagattatgaacgaaaacgaatccctcacagtcactttgacactggagaataatgaggaacttgaatgcgctgttctcaatatttttgaagcagatgaaaaggagtatatcgcacttcttccactggatgaaaacggtgataacacagacggtcagatctatctgtatcgtttcattgataacggagaagaggaagaacctggacttgagaacatcgaagaagatgaagagttcgaccgtgtttccgctgtattcaacgaatggctggatacacaggattttggtgatatcgatcttgatgcattagataacctggaggattaagtcttgaggatgtcagcaaagtgactgacatccggtcagcttttcaatagttcgtctacaaaacgggaaggagtaacttctttcccgttttttattttcacataacagatcttcagaaaatcttttgcccttgtcattgccacatagaataatcttctctcttcttcgatctccttgtctgtctttgccttctgatacggaatccttccttcattcgccgcaatcagaaatacctgcttgaattccagtcctttagaagcatgtatcgtcatcagccggacacccggacgtggtctgtttctttccttttccttcactttcaaagtctccgtatattcttctacatgtgcaaaccattcttcaacacttgaaaatgctttcgccgcctcttcgatctctgccagtacttcattcagatcagatctgtttatctgatgtgtaaatgcatactctttcagaaaatcgtcataaccaatcctttttctgatatactggattgctgcatacggagccatcttcataagcatcttaacatcccactcaaactgatcaatccggtcgatcatccagtctttatcacaatagaacttccgcatgtcttcaaaagaaacctgacttcctgacacgctgtctcttccaagatatcgctttggccgattcatcacctgtaagaaatcctgtctgcgccgctttcctgttgccagccggaaatatgccataatatcctttgcgataaagtgttcatagatattcggaagatgttctttcatctgaaacgggatcttccgttccaccattgcttctaccactgctctcgcatctgtatgaacccggaacagaatcgcaatctcctcttcttttatgccattctccttacatttctgtatctcttcaagaacatattctgcctcttccaccggatctttcacttcctgaatatgaagggcagaaccgccttcacggtttgcttccagttttttactatatctctccacattattttcaatgagtttcaaagaattctgtacgatatttgctgtcgaacggtaattcattccaagcagaatttgttttgcatcagggaaatcctttccaaatccaagcatcaattccgaatcagctccacgaaatccgtagattgcctggtcatcatcccccactacgaacaaattattctccggctgggccagcatacggatcacatcatactgaattcgattaatatcctgaaattcatcaatcaaaacgtatctgaatttcttctgccactgtgcaagtacatctggtcttgaacggaacaattcataacaaagtaccagcatatcatcaaaatcaatctttttcagttcttttctatgccgttcataattacggtaaatattgcgaaaagcatctgcactacacttttctgatacaaattcttccagcggaatccgattattcttcacttttccaatttctgccacaatatcctgaataaaatcttcttcatcaaagatctccattctttctttgttaatcacgccacgtaaaatctgatatttttctgtctctgaaagaatattttcctgattcatccgataagcccatttcaggattccataatagattccatgaaatgtccccactgtaaccggaagatctcttttgcccataaccaaacagaggcgggatttcatctccgccgctgcaaatcttgtaaaagtaacgaccagaatttcttctggtcttactttctgtttctctataaggtattttactctgtttacaatcgtaagcgtcttccccgatcccgggcctgccagtacaagacatgggccgtctgtgtgctggattgcctgcgcctgtgcttcattaaatcccattgtacctcttttcgctgtccttactgaagtttctcgattccaagacggattcttctaagagactcatcttttccgagtacttccatcagttctgttgctccgcccggagtattctgctttccggaaactgctgtacgaagcggccacattacataacctactttgtatcctttttctgttgcaaatgttttcaatgtctcaaacaatgcatcattgctaaagtcctcctgcgcctcaagaaccgggagaacctcgttcagaagtgcgagtgacttctcaggatctgttttcatcttcttgtgtgtatacagtgcaatatcataatctggaagttcttcaaagaaatccacctgctctttgatctccggaagaatctcaattcttgtcttcacaagtgttgcaatcttcttcagatcatagtcctttgttactgcctttttcagataaggctccgcaagtgcatagaacttatcaaaatccattgccttgagatattctccgttcatccatttcaatttcactgtatcaaatacagccggagatttactcatatgatgataatcaaatgcctcaacaagctcttccagagagaagatctctctgttgtctgtcgggcaccatccaagcagtgcaacataattcacaactgcctctgaaacatatccctgctcgatcagatcttcataagaagaatgtccacatctcttgctcaatttcttatgattctcatctgtgatcagtggacagtgtacataaaccggtacttcccagccaaacgcctcataaaggcggttatacttcggtgctgaagataagtactcatttccacgaacaacatgtgaaatctccatcagatgatcgtcaattacatttgcaaaattatatgtcgggaatccatcagatttgatcaggatcatatcgtcaagctctgcattcggaactgtgatatctccgtagatctcatcatggaatgttgtctcaccttcattcggtacattcagacggataacccatggcttacctgctgccagattcgcttctacttcttccttgctcagacttaagcagtgcttatcataaacagaaatctctactccaccttcagaaacctgtgtctttaaagactccagacgctctttgtcacagaaacagtaataagcgtctccctgctctacaagctgctttgcatatttaagataaaggcctgatgcattacgctcactctgtacatacggtccatatccggcatctttatccggtccttcatcatggataagacctgttttctccattgttctgtaaatgatatcaagtgcaccttccacaaaacgttcctggtctgtatcctctacacgaagaaggaaatctcccccttcatgctttgcgatcagatacgcataaagtgctgttcttaagttacccacatgcattcttcctgtcgggcttggtgcaaatcttgttcttactttcttactcattctatcttctccaattcctgtttgttattgttcatatctcgtcatattatagcgcaactccctagattcttcaacaaacaaaatcaatgtttttcttttactccaaaagtttcaccgtttcaggaatacttcccgtctgttcaagtgtgcaggatcttgcatcaatacattccagatttgttccatcaaatgcactttccgcaaaacttttcacactttccggcacctgaaaggttcctgtccacgctgccggaaatgcaagaagaactgtgccatctgccgtgtagagtacaccatctaccgtaacataggctggatttgctgcatctgcttctatccatcccaggttactcagccccgcaaatgctcctgactgaatatttgttatattaacaggaatttcaatctcttctacagcagaaccaagatccgacagcgctcctcccgcaatttgggaacatccttcttcaggaaagagcagtactccatcctgtatcacttctttgcttcctgaaagtccatagatcacaccttccgcattaataagatatcctgtatttatattccccacctctattggctcttcttcctcctcagtttcattttttacattttccattgaatcaggatttgtaattatcggttcacttgcaccatttatagttgtatctctttttacacctggtttttctgccacaatctcttctaccacgggttcttccaccgcaatttcttctactataggttcttccactaaaatttccgccggaacagccgctgcctggttaacatccgcctggttaacatctgtctggatagcttctattgttactttttccggcagatcatttcctgatacatttatatcctctgttgtcgcacagactgctatttcagaaatcagattcttttccaagtataatgaaacaatttcctgtgcagacatcagaatcagcgcaccacttaataaagtcactcccactctggcatatggttttctcaccgtttcctgatgccattcattccaattcaatgctatatccatgttctcttattcctttctctttcccccacattttaatacacgaaataattttagtttatcaaaagaaaaaggatgctgcaaccaaatgcaacatccctttgatttttccgttttgtcctgatagattccaaggattctatacgttaatttcagccttcacaccaaggatttctttattcttttcaagcagtggacggatcacattcttaagatatgcatctacctgctcacttgcacgtccaacatatttctccggtttcattgtcttctgaagatcctctaaagtcaggttgaatgcaggatcagctgcgatcagttcaagaaggttattgtcgagtcccttctcttttacatttcttcctgcttccatagaaagctcacggattctttcgtgcagttcctgacggtctccgccggctttaacagcatccatcataatattctctgttgccatgaatggaagttcggacatcagacgcttctcgattactttcgggtatacaaccagtccgtctacaacgttcagacaaagatcaagaattccgtcgattgcaaggaatccttccggaacactcagacgcttgttagcggaatcatcaagtgttctctcaaaccactgtgttgcagatgtaattgccggattaagtgcatcgatcatcacatatcttgaaagggaagcaattctctcacttctcatcgggtttctcttataagccattgctgaagatccgatctgtgtcttctcaaatggttcttcaatttctttcaaatgctgaagcagacggatatcattagagaatttgtgagcacttgcagcgattcctgccagtacattcagtactcttgtgtctacttttcttgaataagtctgtccggataccggataacatgccttgaatcccatcttctcagcgatcatcggatcgatcttgtcaattgtctcctgatctccgtcgaacagttcaaggaaacttgcctgtgttcctgttgttcctttagatccaagcagtttcaagcttccaagtacatattccagatcctcaagatccatttcaaactcctgcatccagagagtcgctctctttccaacagttgtcggctgtgccggctggaaatgtgtgaaagcaagtgtaggctggtttttctgctcctctgcaaacttcgcaagctctgcaattacattcacaagctttgtgcgaaccagtttcagtgcttctgccataataataatatctgtattatctcctacgtaacaggatgtagctccaagatggatgattccttttgcttttgggcactgaacaccatatgcataaacatgagacataacatcatgacgtacaaccttctcacgttcctttgccacctcaaagttaatatcatccgcatggctcttcatctcttcgatctgctcgtctgtgatgttgagtccaagctccttctcagtctctgccagtgcgatccaaagtcttctccatgttctgaactttttgtccggtgagaagatatactgcatctcgcggcttgcataacgctctgaaagcgggcttacataacgatcattactcataattcttttctccttgtttcatatctttatcgtaactgtttatctattataacacataaactgagtcttcaaaatcaattttgttcaaatgcctgactgatatcctcttccggaactttcatcggatactttcctgtaaagcaggcatcgcaatacttaagatctccaaccatatctttcagtttctcgatctccatgtatccaagagagtctgctccgatcagctgacggatctcctcctgtgtgtgagtatgtgcgatcagctgctcattcgacggaacatctgttccaaaaaagcatggatgtaagaacggtggagaactgatacgtacatgtacctcttttgctccggcttttttcagcatcttaataatatttgcacaagttgttccacgcacgatggaatcatctaccattacgattcgttttccctttacaacttccggaattacattcagtttgatctttacactggaaacacgttcgctctgtttcggtttgataaatgttcttcccacataactgttcttgtgaaatgccattccataaggaattcctgactgctcagaatatcctttcgctgctaccagaccggaatccggaactcccacaacaagatcagcgtctaccggataagattccgcaagtgcttttcctgccagaattctggaatggtatacacctacaccatcgattgtactgtctgttcttgcaaaataaatatactcaaaaatacatcttgcctgtttttcagaatcgatcaccatactcgtatctgactggattccatgttttcttgtaattgttacaatttctcccggaagaacatctcttacaaattcaccgtctacagctgcgatcgcacagctctcagaagcaaggaaatatgtattgtcacgtttcccgatacaaagtggcttgagtccaaatggatctcttgcaccaatcatttttctcgggctgctcacaacaagtgcatatgcacccttgatcttctgcatcgcacacttcacagcttcttctgctgtcggtgtatgaagacgctctcttgcaataagatatgcgattacttcagagtctattgttgtctggaaaatagcacctgtctggctgagttcttctctcagctcaattgcatttactaaatttccattatgtgcaatcgcaagtgttccttttacatagtttataacaagtggcattgcattctctacacgtgttgcacctgctgttgaatatctcacatgccccacgccaagatttcctttcagctctgaaagtccctcttcatcaaacacgtcatccacatggccaagtcctttttttgaaaggacgtttctcttcccataagtgtctgtcactgcaataccgcagctctcctgacctctatgctgcaaagcaaacaagccataatagactgatgcagccacatcatgtccatccacatcataagcaccaaaaacaccgcattcttccccaagtcccgtcactgctttttcaaattcactcatgtcagtttatgctccttacctagttcctgctagtttttatcatgatttctgtatcatacaaaaccgattataatataaggcggagtgaaaatcaacattccctccgccttgtatttcttcctgctcattattttatttgcgttcaatatattagtatttctaatatattcgtcgtttttattcttcgtatcttattaccaccttcatttttgtccagtatttacaaaatcactatccgtttgtataacgtgacaaaaattgacgggtacgctcttcttttggattttcaaacacttcctcaggtgttccctgctcaagtattttaccgtcatccataaacagaactttgtccgatacgtctcttgcaaatgccatctcatgcgttacgatgatcatcgtagtattctgatctgcaagtcctttgataactttcagtacttcacctgtaagctccggatcaagtgctgaagtcggctcgtcaaagcatagaatatccggactaagtgcaagtgcacgggcaatcgccacacgctgacactgtcctccggaaagttgatgcgtatagttattcatacgctctgaaagtcccatctgatctaagaggttctttgcttctgcttcaatctctgcatgtatctctttcttgcgtgccttataatcaggctgactttttgcaagtagttccttcgccagcattacattcccaagtgctgtatactgcgggaacagattaaaagactggaatacaagtccaaaatgtaatcttttcttacggatctcactttcctgttttgttacaggatttgcagcatcaaacaataattcatcatttacacggatcacacctttatccggtgtctccaaaaaattcaggcagcgcagaagtgtcgtctttccacttcccgaggaaccgatcaaggaaagtacctgtcctctttccaatgaaaagctgatatccttcagtacttctgtccgtccaaatgttttatttatgtgttctacttcaagtattgccatttatctcttcctcccaatttaattaaaatattccagcttcttctcaagctttccaagaaggactgtcagaataccattgaagatcagataataaaaagctgtaaagaacatcggccagatcgcgcctgagattccctgagaacctttcaggaacgcctgtcctgcccagataatctcctgcagtgcaatgattcgtgcaagagaagtatcttttacaagtgtgatgatctcatttgacatcggtggaacaattctcttcaccatctgaagcagcttaaccttaaagaagatctgatgctttgtcattccaagaacaagtccggcctccgtctgtccctgtgggataccctggattcctccgcggtaaattaccgagaaatagcatgcatagttaaagataaatgcaaccgaagctgcaagaaatcttccgctttcaccgccaccccagattgggtttcctaagaccagtcccgggaaataataaatgataagcatctggatcataagcggtgtaccacgtatgatccatacaacaatattcgtaatataactcaacggtttaaaatgtgacatcgatccaaatgcaataaccagtcccaacggaatagctccaagaagcgttgcaaaaaacagcttcagcgtctgtaaaaatcccacattcagtgagtgaataacgattggaaattgttccataataagttccattttattaaagctccatcctaaatttatttttcaatcaatgcagcctgtactttataagtctcagcacatttcttcattgatccatcttccatactctttttaaagtaatcattcagagctactgcaagatcagatcctttacggaatccaacaccatactcctcattgttcagacttattgtgtaagtaagatctgcataacctgttccttctccgatcatagctgctgccatcaaagcatcaattgcagctgcatctgaatttccggaagcaacctccatcagtgcatctgcctgtgatgtaaccgatgtatactgtgcaccaattctttcaacctgatcttcccctgcacttcctgcttctactgcaaaagttaaatctttcacactttcctcatcctgatacttatctgctttgtcagccggtacaactacaacctgcgcgttattcatataagcatctgtgcattccatagagctttccacttcatctgtcagtgtcataccattccatacacagtcgattgactttccatcaagctcaagctctttattatcccagtcaatctctacaaattctgcctcaactccgatactctctgcaaatgctttcgccatgtctgcgtcaaatccgacccactcaccattatcatctttataatccattggttcaaaatcagtaacaccgaccacgagtgtccctttgtctttcacatattcaagatcactccctgttgattccgctttcttattcgcattagaagagtctgaaccacatcctgctaacatagaaactgcaagtcctgcacataataacacacttaatacttttcttttcataataataccctccatcatcgagcttggcttttattctctaccaatgagtcactgtaccacggtaaagttaccgttgtattctaccatagcatacaatatatgtcaaaccccaaaaacaataaccaaaaggtacagaacaatgcaggttactgttcactcccgtgtcaatcactccgctgattgacacggaggatgcgcgttttgacttgaatgcatctcgccccatcgccaaaggcgatttaaaatggcgagatgcgttgctggtcgcacatcgtgtgaacagtaaacaatgcagctgctcatagattctgtgaacagctgcataaaaagtctgtattatgtatgatttcttctatgtttcctcttccacttctccaaaagtacttcatttggctcaatctgaagattctgcttcacttcgtccatttcgcttctcatctgtgcattcacttcctgatattcactgtgctttgtaagcaaaatgtgaaattcttccagcgacatatacttataagacgcatacagatatggttttagtaattccttatcttcgcagatctggtaggctctgtcatacattttggccgcttcctgataaaggaacaatcgtccatatgcagctccaagacatgcatagatctttccatagaatttttcatctacactctcatctttttcctgattcaggatttcctgataaacgatgattgcttcttcaatctcaccgctttcaagaagattatcgcctttatacttcttacgctctacatccttctgatttttcagatgttccaaaacattttggatacggatcatctcagattctttatagatctttgaagctttcaagattgtaagaacaaagttctcgacagatccacgcatacgcatcaaatctcgaagctgctctgccagttctttcatcccgatctcttcttccaaccaggtgcaaagcggttcattcatgatcgtataatcgatcagatataaattattacacagatagtaacacaattcttctattgtaaagatcctgcagtggatcctggaaatctcataaggatgtgctgcgtgtctgtcatgacaaagaattaaatttcccatcattacctcctaaatgtatcaccttttcctcacggaaatccgtcggcaggaagaaatctccaaatccgacatcacgtactgtaatcttgcaggttttttcatcctgaaacatcgtttctatctgaagtcttgtagagtactctgctcgctttggaagtctctccaaagaaattttttcggtcttaaccgttccctgaaccagtgactcgatatggaactctatatcatcaccctcttcaaggatcacttcccactgattattcgactcataccagtgtgcaccccaggaaacaagcggataccacatttcctgaccatccacacgcatattgactgtaatctgatctgtcagcttagtctccgatagataaaccggattctctatatgcatatacagttttctgtatgcagtataacaagctcctttgctgtacagattatttccgataaatgctcttcttccattgcaaagcacccgcaatgacttcggataccagttattttcgaacccttctcctgtcaggaatacagaagaaacaatcctcttatcaaacacgctctgtataaatttacagaacatcgcatcggcttcttttgctttgtcctcgttcaaaaccggataaacaagcgccagttctttcatatgtgcatttgcaacttcatcaaccgtaacaaatgtagtctttccaccaccaagtcccggcttcagtctgcgcagcatatatgctttgatctcattacggtcacagcagaacaatgctgcatcatactgccacagttctttcggctgatagaagagataattacaaaaactctctttataatcctgaataaagatatgtcttttatcaatattcatacgaactgcgatccttcgaagcatctgtgccagttcttctgtaagaaccggtacactaaacacaattccatcaattttaggaaatgactgtaaagacatctggataaactgtgaaagcagccatactgcatcatatgtctcatcaccaaattcaattttctcatttgcaagacttctcgaaagcagacgggcaacggtaaatccttctttcagtgttgcaagacgttttgcctcttttccatatgcccatgtgtctcttagttttccaataatcaaaggaatctgaaaattatctgagtcaacttccaatgtctgaggttccatctctttatcattataaaaactgatctggcatgtcttttcatttatctcatatccaattatacttccctgtcccatgaaaagatttcctccttaatactgtatgaacatatgtgatgcaaccgcatcttccagtgcatactgcttcatcttcttctctcgttcttccggatcttcttccagaataatgtcattgagccttccatatctgcccggttcacctttttcaaccgtatgctggcagatctttttctcacttctgtaagaatttccgtcaattgtttctttaaaataatagatcagtcgttcatgcgagaacaacacaaacttcttcacatacaaattctcatacattggtgtcagaagttctgttgcataatcagaatctccgtttccacctttctgcaactgataatacaacataacacggctatccttctggcccttgtattctaccattgtcttatcccacaactggaattcaatcagccactccttatcatacttaaggaaaaatgggaaataaatctgtttgccacaaagttcctgcataaactttttcagcgtcttcttaaggcttgtttcatactcttgatccgaataatatttcaaaacagcaatcatacaaatatcgattgttgcctcacccttctctgcttccctgcagataatatcaattatagatttctctatcttacgtgcttctacaacatattctctggagacatatgccagataagcctgctggagccggaagtatgcaccttcatcataataagcttcaaatacttttgtctcctggaataattcctctgaaaagagcatctgtgtaatgatccgttctgccagtttatgtgtatggacttcatactctctggcaactttccacaattccttccatctcctgtgttgtccacagtagaagtttgccaaatacgtaagaatcactttatcatactgttttttcttaaataaatcataacaaacataggtcagaaaatcatcattctcataatttgtctcacgaatcatcttgctgcacagtgcctggatctcatcctccgggaaattttccagacccttttcctttacgatttccagtgtcagctcttcctcttcttcaaacgctttgcttcggttcaggctatttgcatattttctgcagatatccatatatctaagttcataaaacagacgtttactctcatatgggatagaatctgtataatgtcttccatcttttgcttcccatacaatgcgatccgtctttgcatacagaaatactctggctccattctctgtatatgctgccttctgtgtaattgttccatcagctgcgattacatgaataaatttcatattcgtaacctttgttgtaatccaatatgcgtgacacacatcataaagagcgcggattctgtcctgactcatgtccgtctctacaaggaatcgcttataaatgatccgcagatcttcatctatatttctcttctccagctgattccatgtgaattcttccatctcatctctgtagtgcgcataaatctcgcttgtctcatcttcataagtaatcagatttgcatacaaaaatgcgcatttcttataatccagagaatttccatgcataaaatacaaatataccgaacgaggaagctgcttatgaaattcttccggtctcgcagccgccatataatattcgtaaagctgcgcgatcttcaactctgcgtctaccgctttctcataccaatggaaatagatgtgttctgttctgctgccttttataagcaatgtacagatagaagtcaatatcatcgcttcatcatacatctcataacacttcacaagtacattatacagatgtttatcaaaattcttcatctgacttgccaggtttgctgtatataatgcaagttccttcgtcatcagtttatatttcacgccaaaaagcagaacctgtacttcaaactgtccgagttttttaagagatgagctcttctctttaaaacaacggaatgcctgaagatagaaccataagctgtgagacttatactccataaactgcttctcaagcgcattcagtctttcactgtagattttatattctgaatcaacctcaatcagcatacaaagaatccgccagctgtccggatgcttcataaaagaacgtgaaagttcttctgcgacccttctctgcccaatcgaatcattactcagctttgtcgtcagataaagataataggaactcaattcaacatccttaccgattgcaaaacgattgtagttataagattctaaaagccattttgcctcatccatccgattacccaaaatgcagatatgtgcctgggcaagaaggtaaaattcattacgttcatctacctcgcgaagatgtgaaatcttcttaatagaagtctctgtccaatcttccagtgacatcttgtcaccttcatatttcagataatctttcagaattccattaaattctttttcatttgcacgatgttcctcatctctgcaaatatccttttccactacgacctcataactcaatgtttcatatggagtttccagaatgatccttccaaagttacttcctctgtgaagcttgtccatagaaataccatattccagacgataggcattacctataaattcatctgtcgtcagatgtctgtgctcaacagaaaggaaatcaccttctgttcttacatcaatctccagatatccccaggtatttttcttcacagtaaaagtctcttttctgtcttctacaagagaaataaaagcacggctttcttcttctaatgtaagaaaaatcttctctttctgcttgcaccctaccaagaattcttcaagggcgtgctgatccagttcccatttacgcatattattataaagcgccttgatcctcgtatcttcatatttgagaatctcaaagaaatctctggatcggaataacttcactgcctcagctgcatcacgatatgtaagcttcttaaaatcttccagactctgaacctttccgtatcgagtcataacaaatggtttctcaataattgcagtaaatgcaatatcatactctccaccattacatacaatcgtaaattttccatgttcaacatgtcccggcacaagtcctcttccatcatatgtataataaatatttactggatttccatcaaagccctgctctgcgcactgtacacgataggaagaaggatatacaagcccacgtattgtcccttccccttcattctgcagagaaaagcttccctcatatttttctccttctccgacacgcatcgtaatgtgagtctcaggaaaaataatttccggctgcgggatgtgaaaatccccctttgcaaaacgtttgatcttattcttcaaatccgtcacctactcaaatttttaatcatccataagtttgcttctggcaactgccaaaaacgctactataaattatatcattagtatacatgatcttgcaatgggggattgtataaagttttacatccattttttcatcaaaacatcccctttgtttctcttaaaaaaatggatacatttttatcagcaatttttcatcattggatacaagtaagtaaaaccgagacaaatcaaacagaacgtgctataataaaaatcatctgaatgttatttctacaaaggaggacttcattatgaaattagtaattactatgagtcgtcgtttcggtaccggagccagcattattgctgaagagctttcgaaacgacttgatattccggtctatgacaaggcctatatagaagaaaagctctctgatcacaaatatgaaagtgaagctgaagcaatccggaaactggctgaaagcccttgtatcatcctcggacgatgcgcctcagatattctgaaagaccggatgaatgtattaaacatctatgtgagtgctgccaaagaggaccgcattcagagaatcatgaaaaaagaaaatcttgatcatgatgccgcaaaagaaaaggtggagcatacagatgaagaacgtgctgcttattattacgaacacaccggcaagacctggggagatgtgaatgattatcacatgattcttgacacttccgaactcggtgttgaaaactgtgccgatattctgatgcattatttcgaaaaactggaatacatttaatttttcgtgcgcggtgcgcatcctaagcggagtgttttttatatatttggaaaggactttcctaatatataaatataacagggacaaaaacttattagtcttcacaaagtttttgtccctgttttttaattctggctgtctgaagtatctgatgtatctgacgttttaattgttacaccctgttcttcaaaactgatcttcttccatacttttttctcttctttgatttttgtatcctttttccactgcttcagaagcgaatcatactgttcctgttttctctcacttacaatactttcctttttactgtctgttgcctctctgtccagaagacttgtaagctttgcaatataaattccattctctgtctctataatgtctgtaacatcacctgcatttgttaacgcatctgctgctgcaatcagatccttatccgggcttgtactttcagagtcaaatgtagctgtctgggctgtaagtcctgctgctgatgcaacagtctccatatcttctccaccctttaaccgatcatcaaatgcctgtgcggtcgtcttcaaggcttctttctcatcatctgataatgtctgggattctcccgaatcatctgttgttgtatatgagaataagagatattgcatactcttctgtgctgcatcttcatctgatacattctcatccacaccagcttccattgccgcttccatcttattcgaaattgtcatcagttcgagaactttagccacttcctcctcatctcctgataccactttcttcacatcatccgaattatcttcactgaattttgctgccgcatctttaatcgcctgctgctcttcctctgtcagtgcaacatcatagtcagatacatgctgtgaaacaagatacatattctccagattctcaagaatactcttctttgtctgctcctcatatgtctgatcgcctgatgcttcctttgcccacatctcttctgctgttgttcccatcatactcgcatagtaggtttcatactgagcctgctgcaatcttgcgtaaaaattcgcgactccaagtgtaatcttctcatcaccgactgttgcaactgtctcatctgtatttattgttccgcatcctgtcaaagatgttgctgtcaatgtgcctaccactgcaagcactgccagcctttttgccaaacgtgccatctagtaaatcctcctctttttacgtattcacttacgcagccatactattgctcattatatcgtgttttttgttctatcacaaccccaaacacagaatctcctcaactatcctaatctaatcgaagttcacgaatactctctacaatttctcttagcatttgcagaacattttcccctttctcttttccgcttctccctttcttttgataaaagaaatacggaactgcttctgctttgaaaatcatattatttccatatttctttaaaagtaccggaatttttgtcggatctagatttgctttttcatataagacaaatttgtagtcttttcccttttgttctattgctgtaatatatgcagaatgcgcaagactcttaagtgctgcaatatgaagaagctgctgtacttttttcggaagatctccaaaacgatcaatcagctcttctgtcatatcatccatctcttcttccgtctcgattgtagcaattcttttataaatatctaatttttgatactcatttttaatataagattccggaataaatgcatctatatcaaggtcaattgttgtagcgtagtctgcttcttctttttcacctttcaactgactgacagcctcattaagcatcttgcaatacaggtcatatccaactgctgccatatggccactttgcgactctcccagaagatttcccgcacctcggatctcaagatcacgcattgcaatcttgaatcccgatccaagatctgtaaattcgcgaattgcagccagcctcttctctgcaacttctttaagcatcttatccctctgatacagcagaaatgcatatgccattcgattggatctcccaactcttcctcgcagctgatataactgtgacagtccaaatcgatctgcatcctgtatgatcatcgtattagcattcgcaatgtccagtcctgtttcaataattgttgttgatacaagcacatcaatatcaccattgataaaatcatacataatatcttccaactgatgctcattcatctgtccatgtgcgtaagatactcttgcatccggcaccaatttctgcacacggagtgccacatctgcaatattttccactctgttataaacataatagacctgtccacctctagcgagttcacgctcaattgcttcacggaccatctcatcattgtattccattacatacgtctgtattggcatacgatccatcggtgcttcctcaagcacactcatatcgcgaattccgatcagactcatatgaagtgttctcgggattggcgttgctgtcagcgtcagcacatctatattttctcttaattttttaattttttccttatgcgtcacaccaaaacgttgttcttcatctatgatcagaagtcctaaatctttatatccaacatcctttgaaagcactctgtgtgttccgatcacgatatcaaccagaccttttttcaaatcctctactgtttttttctgttgcgcctgcgtccgaaaacggctcatcaggtcaacacgcaccggaaaatctttaaatctttgaataaatgtattatagtgttgctgcgcaagaatcgttgtaggtacaagataaacaacttgtttcccttcctgcactgccttaaaagctgctcttatcgcaatttcagtcttaccatatcctacatctccgcagatcagacgatccatgatcttcgtactttccatatctttctttgtatcttcaattgcacgaagctgatcctctgtctcttcaaatggaaacatctcctcaaactctctctgccagaccgtatccggtccataaacataaccttctgtctgctggcgcgttgcgtagagttttacaagatcttttgcgattaactgaaccgctttttttacctgtccttttgtttttttccactgaggtgtaccaagcttattcaatttcggtggctttgcatctgctcctgcgtatttctggatcagatccatctgtgttaccggtatatatagaattcctccgtccgcataggaaattttcatataatcccgagtaacagcatctacttcgactttctcaatcccctgataaattccaagtccgtgattctcatgtaccacatagtctcccggtttaagttcggcaaattcctggatttttttcccttcataagtttttcttttcttttttttctttttcttaccaaaaatatcagattccgagatgatcgtaaactttaacattggatactcgtatccctctgcaatataaccacaggttaccataatctctcccggattcacctgccgttccatctcttcactgtaaaaactgctcaggtcataatctctcagatcttctgcaagacgttttgctcttgttcttgagcccgaaacaagaatcacgcgataccctgttcttttcagtttcttcagatctcgtgtcaggagctcaaaactgctattatacggattgacagttttaacctgcagactgtagacagaccttactttaaacattccacattttgattccaacatggtaaatgcaattccataatacttgttcatctttccaatcgtatgatctgtctgttctacctgaatcggaatctcatctgcctcgatacctgcttcttctctgctctccaagctgtgaaagtactctttttctacgatttctgcagattcttgaagacgtaccggttcatccaaaaacaagattgtctcctttaccggaaaatatgccaaaaagctttccgtttccatctgcttccagttctcagttgccggatagatttctatttcctgtaaattctctgtcgacctctgactttccacatcaaaacttctaatagaatcaacttcatctccccataattcaattcgaaccggattctcttctgtcagtggaaatacatccagaatcccacctctgactgcaaattgtcccggactttcaacctggttttccctttcatatcctaatatcgaaaggttttcctgtaatttctgaaaatccaacgcctcttctgcatgaatcttaatcctgttcccgtacagttcttctttcgatggaagcccatccagaaatgcgtccattgttgtaactacagtaattgcttcccgtcctttcttctctacaatcgcacgcaatacttccatacgtttccctgtcaaaaatgcacccttaatatctgcatgataaaacaaaagatctcttgccggataaaaccatacattttcctccagtacacgccattcttcataagcctgctttgctttttcttcactggaaaaaacgatgactctgtactcaaagccatcgctcagtgctttcgcaagatgtatcttctgtgaattcacacatcctgcgatctgctggaaacccgttttctttcttctcgaactgacaatctcctgataatcagccagttcttttaatggttctaaaaaagcttgcatctctactcgtccttctttttacgattatattcgttcatcgcttcgctcatctggtcactcacgatcagttccaccgcttttaccgcattatcataaccttcgctcatcagttcctgttccgccttagaaaaatgtcctaaaacataatctgcaagatcatacttcggtggtttttctccaactcctacttttattctcggaaaaacctgtccgccaagatgtgcaataatattttttattccattatgcccacctgcactgccttttgcacgaattcttaattgtcctacccccagactgatatcatcataaatcacgatcagttccgtctcaggatccactttataatagtcaatcacacttcggatgctctcgccactaaggttcatataagtctgcggttttaccaaaatcaccttctgtcctgcaatcataccctttccaatcaaagcgcgatgcttctccatagttacatctatattatatctctcagaaagtcgatctataacatcaaatccgacattatgtcttgttccttcgtattctttcgtcggattgcctaatcctgctataatatacatcttcttcttcctttcctaaatgtgttttccatcctcttcttcccgctgtaagcaacacgggcttgttgtcatataacttcctcttgcaaacagcaatctttattttaccgcatgtatgaatatttgtcatgcatatttgctctgtaaattcataaattatataaaaaggggggtcctcatgaaatcaaaaactaaaatcattgtccttcatatgaaagagatcatctatactattatttttgctgctcttggcattcttttgattcttcttctgattcttatgttccatccaaaagaaccgtctcctgaatccgatcctcaatgctgcattgctgaaactaacatctcttcataagcaatttgtaactgttcagagccaagcaaaatttcatgaaacaggtgtaaaatgcttgcatttttaagactgtttttgaaattttatttggcggatacgccacaccgacgaaatgcgtagcattttggaggttggctctgaacagttacagcaatttttatatattaggaaaggactttcctaatatataaaaaagccacagtccatcctatctgtggcttttcaattgctttttcacaattactactattttaattctgcttatccttctacgatcagataagtaccatccggcagtgcaaatacttcagaagcctcttctaattcttcctctgacatcccgtctacatccatgccattctcttcaaagtattctcttacttcatccagagattctacaacaactgccatacagtcctccagaaaagcttctgctgcctcaagggtctctgctaccggctcatcaaaaagctgctcctgcttctccaaaaaagtcttcagacactcttcattgtactctcccattacttttctcctcctgtttcttaacaatctttcgtatctcatctgctgaatcaacaacgcattcagctccgtcctctaaaagaacttttcttccacggaatccccaggatacaagaattgtctgcatctttgccgcatgacccgttgcaagatccacttctgaatctccgatgtatgccgactctcccggcaaaactcctaatgatctggcaatcgttaatgcggctgtcggatccggtttcttaggaactccatccttctgtccctgtacatggtcaaaaagttctttcccaaatacttcttcaaccacatggacagcctgcctgtctggcttgtttgataaaactgcaagtttgataccactctctttcaactgctgcaacatctgtggaatttcttcgtacggagcaaccttatacatacaatttgcatcaaatatcctggcatacgcttccaccgcctcttcaagatgacacagttttgtatccccgcctgcctttaatgtccgttcaagcagaaccttcgctccatctccaacgaactgccggcactgttcctttgtgatctgtggcattccaatctctttcatcgtctcattgactgaatattccagtgaatccaatgtgtttgtcaacgttccatccagatcaaaaatacaagcctttatcatagctgcctccatactttatcattggttacattacaccataaccatatctgctcttttctgttactttctgtaacattttcttcccatttatcatagtatgaagtcataaaaatttcaatactttctctctattttccaagaagatattgtctcattgtttttaaagcatttttctctaaacggctcacctgtgcctgcgaaattcctatctgttccgaaacttccatctgcgtctttccttcaaaaaatcgtaaacggatcaaccgtctctctctttcattcagccgttccatcgcagcttctaaagacaactcttccacccagttttcttctctgttcttcttatcactgacctgatccatcacatacagtgcatcgccaccatcattatacaccggttcctgaagactcattggtgtctgtactgcatccagtgcataaactacttcttcttttgaaagtccaatctcttctgcgatttcctgaatgctaggttctttcatattttttcgaatataaccttctcttgtataaattactttataagctatatcacgcaatgagcggctcacgcgaagggaactgttatctcgcagataccggcggatttctcctatgatcataggaactgcgtaggtagaaaacttcacctggcgatctggatcaaagttatctacggcctttacaagccccacacatccaatctgaaacaaatcatctgcattttcattactgctgtcaaaccgtttcatcacactaagcaccagccgaagatttcctttgatgtattcttcccgcgccaacttgtccccctgacgaatcctgcgaaaaagctcctccttctccttttccttgagaagtgggagctttgatgtattcactccacacagttctaccttattcacaaccattgtaagaaacctcctaagtttttttctacttagaatcattctcactctttgaataagatattccatgaagtgctgaattttataaagttttagtccttgacaatcaaatatcccatttatccgacaaattattaatctgcgactcgaattttgctttgtctttattcgcgagaccttcgttcttgtaaataatatcaagtaaacgccttcctgctgcaacaagacgttcaaacgccgcatccgctttacgctgtgccggttttttcgccttcaccggaatctttacaccttcacttaagatctcatttgtcaggaggtctgcttcactgcacggaaacggtgcataagcctgatatccaaatttttcttccaccgtctttgcaaactcttctgttacggtatcttcaccatgcacaacaaagacgcgttgtggcgcctctttaaacgctcccagccattttaagagcccattcatatccgcatgaccactaattccatgaaggctctcaattcttgccttaacttcaatcggctcaccgaacagcttcacattcttttcgccctcgatcagtctgcgtcctaaagtgcccattgcctgatacccaacaaaaagaatcgtacactcttctctccacaaattatgcttcagatggtgacggatacgaccagcatcgcacattccagaagctgagatgatcacctttggtttctcgataaaattgatcatcttagaatcatcacttgttgttgcagtcttaagtccatcaaatataagtggattaatccctgcattaacaagtgcaagtgcatcctcatcaaaacactctctcatattttttgtaaatatcttcgttgcctcaattgcaagcggactgtccagatatacttcgaaattctgatattcttttaataattccttttctttgatctcacgtataaaatagaggagttcctgagttctgcccacagcaaaggaaggaataacaacatttccccctttatcaaatgtctctttcaggattcttgtaaaatctcccagataatccggtttttcctgcgtatgcagccggttgccatacgtagactccatcacaatatagtccgcactctctgtataagccgggtctttaataatcggctgatccagatttccaatatctccggaaaatacaatcttctttgtcactccgtcttctgttgcccagacttcaatacttgctgatccaagcagatgtcctacatctgtaaaccggatctggattccctcacagattgtaatgcgctccccatactgacaaggcacaagcaattcaatcgcattaagtgcatcctgcatctcataaaccggttcatactccggctttcctgctctcctgccttttcgattcctccactctgcctcaaattcctgaatatgcgcactgtcacgaagcatgatatcacacaaatccgctgtcgcataggtagtgaaaatctgccctttaaacccatcctttgcaagctttggcaacattccggaatgatcaatatgtgcatgtgtgaggaatacataatccacttctgttgcactgatcggaagtcccggattttcatacaaatccggcccctgttccataccgcagtcaaccaaaacattctttcctgctacttgcagaaaatgacagcttcccgtaacctcatgggctgcacctacaaatgttaatttcatacatcctcaaccctttctgtcctgtatcttttctttttaagcttcagatactttttcttttattttaacaccatacgggaaattgtacatctttctttttattaaatttttgtaactgctattcataccggaccatttccatccgaagtctgtgcataattttcttttccagtcttgatatataagactgagagattccaagttgatccgcaacctccttctgcgtcatttcttttccctccggatgatccagtccaaacctcatacgaacgattaatttctctcttcctgacagtttattcaaggcacgaaacagaatctttctttctgcctcatcctccagatcccgataaattgtatcctcttctgtcccaagaatatcagatagaagcagttcatttccatcccaatctacatttaaaggttcgtcaatggaaacttccatcttcgtcttactgtttcgtctcaaatacatcaaaatctcattctcaatacaacgtgaagcatatgttgccagtttaattttctttgatggattaaatgtattgattgctttgatcagaccgatggtaccaatagaaatcaaatcttctacacctactcctgtattatcaaacttctttgctatataaacaaccagacgcaaattatgttcaatcagtatctttctcgccttttcatctcgatctgttccaagccaccttaccacctcacgttctttttcattttccaatggtggaggaagaacctcactgcctcctatgtaatgaatctcctgttgaccaccaaataaaaccgtcctgacatttggtacaatccttaatttaaatttctccggcacagccactttaaccatcatataaattcctcctggtttctttcttacatcttctgttgcggcacagtttttcattcacagcatctgcaccttacagttcaatatcaattgataatcttcctccccactgatcggtgattcgctcacaccgatcaacggagattctatccattttttttcatttatttccacacacattttcctgatccggaaaattttcataatgccgctaccatgaacactccgatatggaatatacctgaattccatttcttctttcattacctgatgataaaaatcacaatccagtacatgcaccccttcaccactgagtggatccgtcaggcagttccccgtatccctcaatgcatgaaccctataactatctgcttctgtaaataaaatcacttcacagcaccgttcctgctccatcttaagaactttcaagaacttccaggccatcagaatcccctgtgagctaagcaccgcaatcccataaaacagactgatataatgcagataaggacgaaacatcatcaacgtgcccccaaggaacatcccaaaaaggtaaagcaatcccattcctttgagtatctggagcatacattgtttcctattttttaaccaaagcatacaaaatggaatcaccagataaaaggctatgtttttcatccaggcgggaacagatacaaccaccatcagacatgtcaacacacttccaagaaatgctccggataaaactcctttaaaactatattttccacccgtaatccgttctgtcacgaaaagtaacaggctatccatcatgaagttttccagaaagaaaagatctatgtacaactcatagtgcatcttccaccttccttttcatttcgagtcatcctcgatgtcatatagaattataaaatttgctctttggaaattttgtcagatgctgacagtaaaacagaaagaaaatagaagaatttctgacatccttcgacataaaaagaaaaacggtctgatacttcagaccgtttcatcatttttcaattcaattatttcttaaagaaatccggaatcttaatagactgctctcttactccaccagttgttgatcttggctgcagtgttggcattgttccaccctgcggtcttactgttgatgtctgagctgttctttgtgctgtatagtcataagatggtcttgtatgactttctacaccattcggaaggatagaacttgtcttctgctgtccttccagtcttgctttcagcttggatgcacttccgcctacattatgtaagcccgtagcaataactgtgattgtacattcatcagattttgtatcatcatacatagcaccgaagatgatacttgcactttcgcctgcaagctcctgtacataatcagctgcatcagaagcatccataagtgtaatgtctccagatacattaacgataacattagatgcacctgtgattgttgtctcaagcagtggactggcaacagcctgcttaactgcttcgagtgccttgtcatctccgcgtcctgcaccaataccgatatgtgcaatacctttatccttcataactgtctggatatcagcaaagtcaaggttgatcagagatggtacattgatcaggtctgtgataccctgaataccctgctgaagaacctcgtcagcctttttcaaagcttccggcatagtagtacgtctgtctacaacttcaagcagtttgtcattcgggataacgatgattgtatcaacgttctcctttaatttatcaataccattgattgcattctgcattcttgtcttggattcgaaacggaaaggctttgtgacaactcctactgtcagagcgccctgctctttcgcaattcttgcgataaccggagcagcacctgttccagttccgcctcccataccgcaggtaacaaataccatgtctgcaccttttaatgcagcctggatctcctcagcgctttcttctgctgccttctctcccatctcaggctgtgcaccagcaccaagtccttttgtcagtttttcaccgatctgcataagtgtcggtgctttacacagctgtaatgcctgtttatctgtattcacagctatgaattctacgcctgcaatctgttcgtcgatcattcggttcacggcattgttaccgcctccgccgactccgacaacaataattcttgcagccgcttcagattcgttggttttaatttctaacaagagtagttcctcctttgtcgtcttattaattcttatatacatcccttattttaattgaacgatacaattcaataagtatataataaagtcttttccgtaaataatcaatagattttttcttatttttggtttttttccaacaattcagcttcaagactgcggtgtaaagttaattgatgctgaatctgcttcataattctcaagatgaagtacccccgcctgatccggatactgttccttcagcttctcaagaatcggtttgatctgtgcaattctgatctcatattctttattcccaattaaaacttctactgatccaaaatataataccacactctgttcattggcatataccagtttatccggtgtaagtgaatatttcaccagatactttgaagcctctgcgatcaaagtgaatgcactgtcatcttccaccggaatcttttttccgatctctactttcgatgcatcgaaagaaagtccttccacataaggtactcctgtaaaagttttcttgctttcaaaaagtgctgtccccttccggtcaaaatataaatttgtatcattgaaagaaacataaccggattttcctttctctttcacatgcgcaacaagcgtccatggattttcaaatgtcaatttcatttcttccacaacggacggaacttctgcatctgtataattatatttccagaataaatacaccgtattcatggagagtttatctttctcgagccagctgatgattgaattctctccgtaatattcatttcccttcacctttatactgcgtgtctgaaagagtaaaacaaatactacaagcaacagtaatattacaataaagcggaacatccctctcttctttttcttcttttttttcattgatcagattccttcctctgttcatgttttccatacccggactccatctgtatgaaatacaggcaactctattgtaccaaacgtgatatgctaaggacaagccccatttccaaaagcagaaaaacaactgacgttccaccataactgataaacggaagtgtaattcctgtattcggtatagaatttgtgacgacagcaatattcaatattacctgaatcatcatatgtgccatggctcccactgcaatcaacgcgccaaaaagatccggtgcgtgtgttgcaatcacaaaaaatctccagattaaaatcagaaacagtacaatgatagtccccgcaccaacaagccctaattcttcacagacaatagaaaaaatcatatcattctgtgcttccggcaggaatcccagtttttgtacactgtttcccagcccccggccaaacattcctccacttccaattgcataaagtccttgcaatgtctgatatcctttttcatacttctccggattgcgccagattgcaagtcgctccagccgatagctttccaaggcgaggaaaattcccaaaaatccaactcctgatacggccatccatataaactgtgcatatcttggacttgcaacaaaaatcaatgtaactgcgattccgaggataatgattgctgtactcagattacttgcccctaccagaccgacaaccggcaggattgaaagcatcattccggacattatccgaagttttgatatttttttcacatttcggttgatcagccaggccagaaacaagatcactgctactttagaaaattctgaaggctgaaaagaaaacggacccaaagacaaccatcttttggatccgttatattcttttccgaatgccatgacagcaatggataaaccgattgcagccaaatatcctggcacagcaagtggaatccatctgtgataatcaattcctgcgatccatagcattcctgccattccaagaactgtagccagtccctgctttttcagataataataagaatcatgaaacttcaccctgccgttatatgcacttgtactggtcagaaggatcagaccaaccagtacgagaatcagcaccgtcacaagcagtgtatcatcatacgtgtgcttctttgcaggacgcttcaatacagttcaccctttacaaattatttacaagctctttaaacttatccccacgttcttcataattcttaaacattccccaacttgcacatgcaggagaaaggagtactgcatctcccggttttgcattctctacacattttgcaaatgcttcctcaaatgtatccgccatcacaatttcttcaaatccatgtgctctggctgtctctgcgatcttgtcgcgtgtcgcaccaagaagtactaatttctttacttttccatcaaaggaatcgatccattcatcataagcagaatccttatcataacctccaccaatcagaactgtcggacgattcatcgcctgaatccccttaatagctgcatctgggtttgttcccttggaatcattgtaatatacaactccattcttttctgccacatattcaatacgatgttcgaccccctggaactctttcagcgttctgcggatcacatctaccggaaccccatatgctgctgccattccggttgctgccatcgcattctcatgattgtgcgttccaagaatattcaattcatctacatggcataccggtgtcttctctccgttcattgcaagaacgatctgaccgttttccagatagattccttcttctaatatacgctgactgctgaaatatagaacctttgactttacattttctccaaatacccttgtcacatcatcttcgtaattcagaacacaagtatctttctctgtctgattcttcgcaatattttcctttgcctctatgtatgcttccatcgtatgatgacgattcagatgatccggagtaatattcaggatcgcgctgactctcggacggaatgtctgaattgtttctagctgaaagctgctcatctcagcaacaattacagaatcctctcttgtctggagtgcaatacttgtatatggattaccgatatttcctaccacaaaactgctctgcgcatagtttttcataatttctccaagcagagaagtggtcgttgtctttccgttcgttccagtaattgcaagaacatcaccttttccgaagacatacgcaagctcgatctcgccccagattggaagtcctttctcacgcatctcatttacgattggaagatctgttcggacccccggactcattacaacaagagaaagtttatcaagaagttctcctttcctgtctccctcaagtgttccaaggatgatttccagtgactcactgtccccgccttcaatctttgcacggatctcttccggattcagcttatcgttaccatcatacaatacgacctttgcttcttctttcaaaaggagcgcacatgctgcctctccactgattccagaaccaaatactaatacgtttttatcttttacaatcattcttctatacccccataagagcgatcaggcaaagaattgccgtcacgatagaaaatactgctactacccgtgtctctgaccatccacaaagctcgaaatggtgatggatcggtgccatcttaaagagacgctttcctcccgtctttttgaaatatgttacctgcagaataactgaaataacttctacaagataaataaatccaacaataatgatataaagtggcatctgcatcatatatgctgttcctgcaacaaacccacctaatgcaagagaacctgtatctcccatgaacacactggccggatacacattaaaaagaaggaatcccatcaatgcaccgacaactgcgcaagtgatcggctcaatcccactcttcgttcctattgctacaactgtgaaaaaagttgccaccaaaacggttacgcttgatgcaagaccatccagtccgtccgtaaagtttgttccattaactgtaccaatcactgcaaagaaaagaaccggaattgcaagccatccaagattcaattcataaccgccggagaatggaacgatcattgtaagcggaatcttcgctacttttacgatataaaatgcaaaaattgctgtcactacaatctggagtgccatcttctgcattggaaaaagtccgtctgaacgtttcatgacaaccttaagataatcatccagaaatccaatcagtccgaatcctactgtaaggaaaagtaccgggatgatctttggatagtccttcacataaaacagggacgtaatcacgacagctgccagaatgataatacctcccattgtcggtgttcctgccttcttcaaatgagactgtacaccctccacacgctccgtctggcccatctttaaccttctcaggaaaggaatgactaccggtccaagcacaaggcttataacaaatgcaatcaataccggaattactacatgactgttcatatatacacctcttcatttcttttgttttacacagagaatccttcttatgtacttttctgtcatcagatgatgtgagtgtcaaaaataaattttgccactcactgatgtaaccggattgctccattgctatgcaattcccgcaatcctcgaacagcatcagattctcaaaatgcactttacagtatactccattggtcagtttttttcaatcccgagatacggaagcacattgtcatagatgctgcgcaaaaccggagctgcaatcgttcctccgtaataaatcccctgtgggttacggatcactacaattccaagaacctgcggatcttccgccggtgcaaaccctataaatgatgaaatatatttgtttgcgcttcttggaagagtctgtgatgttgcagtcttgcctccgatcgaatatccttcaatgtatccatttttaccagatccttcttctactacactcttcagaagtattctcatcgtctccgatgttttttcagatacaatcccattcttctttttgtatttcagctttcgtatctctgttccgtctttttcaagaactgccactccaaaatgcggtgtcacccggtatcccccattaaccagcgaacttactgttgttgccatttgaaccggtgttacctggaacgactgtccaaatgaaatcgttgccaattccacaagaccaatatcttctacgttatgcataattgttcccgcttcacccggaagatcaatattcgtcagactaagtaatccaaactgtttaaaataagcataaaatttctctgctccaagccgaagaccaatatcaataaataccggattacaggaattctgtatcccctggataaacgtttcctgtccatgtccaccaaccttatgacaccggatttttctgtcttctacaatccggtatcccggacaggaaaatgtatccgacaaagaaacaacaccttcttcaagacatgctgatgctgtaatgattttaaacgttgatcccggctcatatgtatcattaatacagggatttcgccacatctgatttaacatctcctgagcctgttcatccgtctgttctgtattttcatccacatcaatcaattcaaaaggggtattcagattaaattccggtgtatttaccattgcaaatatctctccgtcctgcggattcataagcaatacagatacactatccgcctgtttttcctcctgaaccttttttgctgcctgttcacagtacttctgaatattatgatccagactaatccgaagcgtgttcccagccacaggttcaatcctgtcttctgctactttctcaagttcgactcctctcgcatccgtcactgtaagaatggttccatcggttccttttaatacctcttcatattttacttcaagtccgatgattccctggttgtccccacctgtaaatccaagaactctggatgcaaatgtatcataaggataatatcttttaaaatcctcatctacttttactcctgcaagatccagattacggattctatcccccgtttctttttccacatttgttttaattttttccatcgaagacactttttctacttttttccggatgttttcttcctcttctccaagttcctgacagagagctgcgatcacctgctccggatcttttatctgattatggatcacggaaattgtgcataccgtcctgttcgttgccaggacaactccatttctgtcaacaatctctcctcttgccgctttgatttttctttctcgctcatgaagatctttcgccagcttctgataatgtgcagcatcaaaaatcatcagataaacaagtcttccgaaaagagccgaaatcaaaagaactgcgcagaaaaaaacaactattgttttttttcggttatatgttttatttttcacaaaaaataactccgagaaagacatttctacaatgtattatgtctttttcggagttattcctgtttgcctgtctgctataacacttaatctatattggatgatgttgcccagctgtccaaatccggcttataattttcatcaacatatgagccgtcttcattactgtaatcatctgtatagtcctgatcataatcagaatactctgtatcttcaaagctctgaccgctctgctgtgtctgactttcccctgtctcttctatggttgtgataccaagatacggaaatgcttctgacatgatattcttcgcaagttcaagaaccaatgaactattatcctgtgcatctacatttgcttcatcaattaccacatagataacaacttccggattctcctgtggagcatatccgatataagaaagaagatatttcccatctttacgtggaagtttctgcgccgtaccagtcttcgctccgatatcatatccttccacctgggctctcttacctgtaccatactgcattaccgcctgtaaatatgtttttactaattcagatgtttctgtcgaaactgtcttacggagcaatacgggattcttcgtttcaatcacatttccattctcatcctggatctgctttacaacatgcggttcataataatacccaccgttgatcagagaactgaaccctgctgccagctgagtcattgtcacattaaagttctgtccgaaagcattcgttgcaagatcaaccggtgtcatcgtatcagttgtatacagaagacttgctgttgatgcttctgccggaaggtcaattcccgtatattctccaaatccgaagatatgctgatacctgataaaattatcaattccgattttttccgccatttccatcaatgcaacgttacaggaattggcaattgcatccattgtgctttccattccatgtccagaacgaagatgacatccgatatcattatctcccacatgaagataaccaccacaataataagattcctctccggtaagagttcctgtctccaatccggctgcaacagtgaatggtttcatcgtagaccccggttcaaatgcatcactgacacagaaatttctccagatactactcaataggttcaattgatccttctcatctatcgcattccatttttcttcggaataaatactggacagatctcttggtttgttcaaatcaaaattagggtaagaggcctcagccagaatctctccggtattcggattcatgatcataaccgctgtattcttgctaccggtcactccacttccttcttctccggcatgttcttcattgaactgttgaatgtatttttccacaatactctgtaaggtaatatctattgttgtaacaacattattcccattctttgctgcttttacattctgttcgactgtatcatcttcatccagataaccatactctctgccatctgtccccgtcataacatcattgtaagcactctcaattccaattgctcctatatttccggaatacgtaaaacctatcacatcacttgccagcgtattatatgggtatgttctgttataatcatcctccagccagattccctttacatttggataattctcagtatcattctttatctcattatatttctgagccgtctcgtaatcgattccttttttcaatataacatatctgctattaggtttttcttctacaatctctcgtactgtcttttcactgattccgaaacatttattcaatactttaatcgtaggatctatatattcttctttatctgtcattacagcaacatcaagaatcacattataaaccctttcacttgtagctatctttgtaccgtttctatccagaatatctccacgtttatatggaattgtcttactgtcataaattttctgattcagtacaagctttgtatacttgcttcccttcgtaacattaatgtatgtaattcttcctacaagaacaagaaaagccagtataactgctataaacagcagtaccagctttctctgcatttttaccgggaattttttagtcagaaattgaaatctgttcttccttctttttcttcctgccatcttccattattccttatttttcacatccttggattgcgctaaaacgccatcttccggaatgttatcatactgttttacatagtcacttgtcgggctttgataatgaatcactttgccctgagactcataaaccattcccatctcgttcattgccttttcacgaacagtctcaagattaacagaatcttccgctgcctgatgtgcagtatcatttgattccttcagatccgtcagttcctgctgtagcgctgtgatctgatctgcacgattcaaaacatctgcctgtaagcgtaaatacataacacaaataaaaactgcacagactgccgccacaattagaaaagtcgcatatgccggactgatccgctgcgcacgatgccggtttttaatcacctgacggcttgttcttttttccttcggcttacgaactgtcccatttccagacggtaaagcttctggctgacgcacggcactaccgtacacatagaagtggttccggtctgctgctggtctattctgctgtctgcgacctgtgtttctcgccatcgctttcctgtcctttctctggattcttgttccgccgggctctccccttcccggaggaacgtttcgtttatactctaaatactccctgtgatatcaaattatgcacgttcaaagattctaagctttgcactctttgatctgctgtttaccgtcaattcctcttctgacggaaggattggcttcctggtgatcactttccctttggatacatttccacatacacaaaccggaaaatgacttggacaaatgcacggattctcattcttacggaaagaactcttcacaattctgtcttcaagcgaatgaaatgtaataatgcaaagtcttcctcctggattcaacagatcgatcatatcatctaatgtatcccgcaaaacatcaagctcatgattcaattcaattcgaagagcctgaaatgtacgttttgacggatgtcctgacgtcttctgaatcttcattggtattgcatgactgataatctcattcaattgtcctgttgtctcaatcggaccttttgtgcgttctgcaacaatgtgcttcgcgatatttttagcaaatctgtcctcgccataatcacgaatcacacgataaagttccgattcactatagtcgttgacaatgtctctggctgtcatcttctgacgctgatccatacgcatatcaagaggtgcgtcaacccgatatgaaaatcccctctcagctgtatccaactgataagaagaaactccaagatctactgtaattccatctactttgtcaattcctatctcatgaagccgcggtttcatatcacaataattgctccggattattgtgaccttctccccgaaaccttccaggcgttttcctgctgctttaatcgcatcagcgtcctggtctatacctattaatctcccctgctcgccaagttttgtacagacttcatatgcatgtccgcctccacctaacgtggcatctacatagatgccatccggttttacgttcaaaccgtctactgtctcatgcaacagcactgaaacgtgctcgaatgccatagactcctccttctgactgcctcacttggcagtctttgttgtcatcagatgcgaattccgatcgcttccatacgttctgcaatcgcatccagatcttcctcgctgatctggtttttctcttcccagagtgccttgtcccagatctcaacacgatcctggactccgaccagaactacttccttctccagatgtgcattctttctaagtgacggtgggacaagaactctcccctgcttgtcgaaactgccctcagatgcacttccaaaaaagtagcgtttaaagattctggcatccttgttcattcgtggtaagctttcgagttcggctacgaatttattccattcttcctgggaatagacaaatagacagccctctaatccgttacagatcacgaagctgtcaccaagatcttcccttaactttgccgggatgatcagtctgcctttttcgtctatgttatggttaaactctcctaataacatacgaaaccctttctctggaatctatggaaatcttcatgtccactaaaggtatcactaccgtaatccctttgcttccactctttctccatattgcaccacattctaccacttctcaccacttagctccattgtaaaccacacttccacctttttcaagtcctttttatgaactttttcgtttcttttcagagttcacgttactgttcacttcctgttttggttgcaagaaacgcaaaaagaggttgccgctttaacaatgatatgccaccttcctataggataacgaaatataaaaatcctataaccggaggacgtatcacttaatacgacaacctctttttattgcactatatgtaattataacaaccttattctgctgaaagtgtactcagataatccttaacagagtcataattcacttctgcaactgcacgttcctgattggaagaatgcagatcatatgctgaatatccgaaccagccaacaattgcaagtacaattactcctgctacacatctttttacattgcgcatgatcttctctttacgcattgtcttctttcggtccgccttttccttcttataacgatccaccttcgcctgactcatctcttgcatactcccttcctattaggtctttggcaattattttatcacagcatatcttaaagcacaacaataattccaccgtcatttgcatacatactactaattcctgctgtatctacaataaaggaatctttcacctttactttctccaaaatcaattttctgacggcctctgcacgttccggacagttgcaatgtgcaattgcaagaatcttctcctccggttttacagcgtccttcgcgacatgctctgccatcttcgccaaagctttcttcatccctctgctcttatccaactgacagattgttccctctggggtagaacccataacaggcttgatattcaatgcgctgactaccagagatttcagtcctgtcagtcgtccattcttacgaagtgtatcaagattctcaagaacaaaatacgtatgctgttcttcaatataagcttctaccgtttcaactacctgttcaaaatccattccggcttcttcacattcctgaatctttcgtccgatcaacgtctctccgacagatgctgaacgagagttaaatacatggatcttttcttctccgccttcttccttataaagtttctctccaagaagtgcactgttataagatccgctcaattcccctgacaaagtaactgcatagactctgtcaacatcacatttgtataattccatataacgctccggggacggacaggatgacttcggacactcctcgcttgcagccactcttcttaaaaaatcagcctgatcaaatgtctcgtcatccggaatgtgaaagccatccacttccatgctaagagaagccgtcttaaaaattccactctccttcatctgtggagtcagctctccacaactatctacgatcactctgtaactcataacttatatcctcccatgctctatcgcatatttttccatcccactttacgtggttttcaatactacatattaatatagcatactttcaataagttgaaaagagctgtttttaaaaagctcacttacgtttcccaattagaaatggaagatatcgatcatatacatacatgattggtaaattagcggcaattatcaaaataaatattaaaatttccccatatacatttgctgtcaacaacggtatgatattgaaaaattttattgaacacaaattccacactattctaaacataatcatgtgtgtccccatcattgtcattgtattttgtcctataaacacaagtaatttagattttatattcttcgataaaccaatgacccaataggctccaatcagaccaccaatcaaacacaaaattggatttcccactctactacaccaaaaatcaatttgctcattaagcattgctattacataggtcagggtacctgaaagaataatcacatcccatcgcttatttacatcacttttatagtaatcttttaagtaataccccactagcataaaagtaaatgcaatcacaccacgcacaaaaacatttatccagtgtgttgaaaatggataatacagaggtataataagaaatgggatccatacaatatacttatatatacttcgataatatttcaagaaaaagtataaaaatatttctcctataaatagtgccgatataaaccaatttgcaccgacattgcaatgaagcgttaacgtatttttcaaaacttccgcaatagaagaaatctgtattttcgaagatataaccgtctcatataaacctgctgtaatatcaagaaacaagtacgggactaacaacgccttcacctttttaattaagaaatcaaaaaaagaaagatcatgaaatgttttttctgaaaataagattcctgaaagaataaaaaacagtggcatgtgaaacgcataaataaagattaatgtttgagagttttctattccttgagaatctctataaaattgatttacatgtccaagaacaacaaaaaggattcctattgctctggcaatatctatatacgttaatcgttgcttaatatccatttcccccataatatatctctcttccttatttcaatcgaatcttcgaagatatcccaagcgcaattcccatctcagccagcaaaatcacaatcgccgtacctccgtaactgataaacggaagggtaacacctgttgtcggcagcattcctgttacaactcctatattcaaagtaacctgcaaagcgatatgtgcaaaaatacctgttgcaatcaacgcaccatacaagtccggagcatttctcgctatgaatagtagtctataaagcataaaagcaaacaagcacaaaataataattgcgccaaacactccaagctcttcacagataactgcaaggatcatatcattctgagcctctggtattgcatgtaatttctgcgtactattcccaagaccctttccaaaaaatccccccgaaccaattgcatatagcccctgtaagaactgataactatctgtatcagcatttgcctccggattcagccatgcaatgattcgacgcatacggaagttatcactttccgcaagtgtatatttcaaaaaaataattccaatgattcccacaattcctactgcaattactccagtaacaaatggttttgtctttggatgcacaacaaaaatcaaaacaactgtgattgaaagaataataacagctgtacttaggttatctgttaatttataagcgccaaagaaagcaataataccataaaatagcaaaattttaattccatcccatttcttcgccttttgccccaagagacagattgcatatgctataaatagaatcactgcaatcttcgtaaactctgccggctgcagcgacagtccacccggaagcctgatccaccttcttgctccatttactgtcttgccaagtggtgtctgcaccaatgccatcaaaaacattgaaaaccaaaaaaattcttttgcatacgcaccatacagatgatagtcaatcttagaaacgataaacattgcaataaatccgataataccgataatcgcctgccttgtaaagaaaaacatatcattattataatcattctgtgcactgtaggcactactgctgtaaagcattacaagtccaaagcacatcagaaaaataattacaagaagcagatcataatcataataaggttttcccttttctcttgtccttttacgttttgtactcgcagacctttccactatttgccgtttcccctgtaccgcagtctgctgagaatatggagaacctgacgttctcacaaccttctgtctctgctccattgagcttcgatacttcctataagcatcactctcatagtttctcatacatactcctatctaaaatctgtatccattctattttttaacattcccaattaataaacagcagatacattttttattattgaacactcatcgccggatgaaccggttttccatgctcaaagaatctgtcataccatacgaggaagatataaactgtccagatcttacggctgttatctgtcttctcattcgtattctttccattcttatgatcatcaagcatcttaagcaggagcttcgtatcaaagaacttcttcgctgcatcagactcaaacatctcttttacaatattatagtacttctcttccttcagccatacacgaatcggaatcgggaatcccagtttcttcttctctgctgtcttacttctgatgtgacgctctgccgcagcacgtaatgcaaccttcgtctttggcgcacgtactttgtattttaacggaagtgtctcggcaagttcaagtacttctctgtcaaggaacggaactctgacttcaagagaattcgccattcccatcttgtcccccttcatcagaatatcatgaactaaccacagatgaagatctacatactgcatctttgtcacaggatcttttcctttcacacgtgcatacaatggttttgtcactttttggattcccggcttacatccttttttcaaaatacgatttgcctcacgctctgtaaaaatattcgtcgcatttgcaaaatatctctcttccagtgtctttccgtgacgcataaggaaacctcttcccttcataccacgtggcagacagcgttctgcaaacgcacccaggaaacggcgtaccggcatcggtattttattaaaagaagtatgttccaaaggttcacaataaatattatatcctccaaacaattcatcagatccctctcctgaaagaactaccttaaccttcttggaagcctctgcactcaggaaataaagtgcgattgcagccggatctgcgaccggctcatccatataatactgaatatccgaaagcttatcccaatattcttccggtgaaatcaccttagcgtcattcttcatgttaatgcttgctgcaaattcctttgcatcctgaatctcactgtactttccttcatcaaatccgactgtaaaagtacgatccacctgtcccagataagtcagataactggagtccacaccactggaaaggtaagaagcaacctctacatcactgattttatgcttctcaacggaatccttcatcacgcgttctacatcatccacaacttcctcaaacggtttcttacaatcacctgtaaaatgaggttcaaaataacgtgtaatgttcatttttccattttcatatgtaaaataatgtcctggctgtacacagaacacccctttaaaaaatgtctcattcgtaggaacaaactggaaagaaagatagtttccaagcgcctcttcattgaacaccttatcaaacttcggatgctccataaatgctttgatttcagaagcaaacatcaatgtaccattcatattcgcataatacagcggtttgattccgaaaatatctctcgctgcaaacaatcttttcttctttgtatcccagattgcaaaagcatacattccgcgaagacggtctaccagtttctcgccccactcttcgtatccatgaatcagtgtctctgaatctgtattcgatacaaactcatgaccagccgctttcagttcttctctcaggtcctggtaattataaatctctccattaaatacaagaaccatgctgcgatcctcattgtacaacggctgatcaccaacggaagaaagatctatgatgctcagacggcgaaatccgagtgctgcatcttcatccacatactttcccgcactatccggtcccctgtgtacgattgtattcatcatattaacaagtacctgttctctgtcatcaacttctccgacaaatcctgcaaatccacacatatgccttctccttttttaattactgtcaactgtatatttgttactgttcacacgttgtgcgaccagcaacgcatctcgccattttaaatcgcctttggcgatggggcgagatgcattcaagccaaaacatgcatcctccgtgtcaatcagcagagtgattgacacgggagtgaactgtaacgtatatttacacccgacaataaatttcttttattatagcctcttttacttagggaaaaaagtccctttcatcaaaaaacagaaaaatactgtgagtataacatcacagtatccccattgatcgtatatttaattgttatggtgtcccatcaacgcgtatattatatctgatttatagggaaaagtaaagggggatttttgagcagtatttacataaaatgtaaatcagggattgccgtctgacaatccctttcacaaaataaacacttcatcttcattcaaattctgggttgatcgcatagaaattcttactatcaagatgttcctgtacaattcttagactttcaccaaatctctgataatgcacaatctctctttctctcaggaaacggatcggatcacagatttcaggatctttaatcagccgcaggatattatcatacgtagtccgtgctttttgctctgctgcaagatcttcatgaagatctgtaatcggatctcccttcgattgaaaatacgttgcagtccacggagctccgctggctgcctgtggccataatgccagtgtatgatcaacataatacggtgcaaaaccggaacgttcaatttcttccggtgacaaattctttgtcagctgatagataattgcacagatcatctccatatgggcaagttcttctgtaccaatatcagtcagtattcctgttacctctttatatggcatcgtatatcgctgtgaaagataacgcatagatgcagccaattcgccatccggtccaccgaactgacttataatgatcttcgccagtttcggattcgtctgggttatcttcacaggatattgaagtcttttttcataattccacataaatcagcatcccccttcctgccacggccatggttcattgatccaattccagcagtcactgttttcgctgactgtatctacagttaaaggtccatatacctctgcatattctttgagtgcttccatacgtttctctttatatttttgaaaatagtcaagtgctttctgattttcaggatgtgtatctaaaaataatttaacatcatctactgcaaaacttatctgatttatatattcaaaaagttctcttcgattcatttcatgacaattgcaactcatttacagcatcctccttttccacgaaatggtttttcaagctcttgaaaaatagttccacactgaaatccataaccgagatcgtgaagttttctccactgctgccatgggacataagccatcgcaaccggaaactcttgcaaaacatccgttttgctgtaatcaccaacacactcatcgcaacagtaatttttcgccttttgctccggaagtggaggaacaggaatattgcaatgaagctgtctttcattttcttgccttgtttgtggtctgtaatttccattctgacaataacagttcgtattcctattagaacaatatggtgccataaaataaatccttatatcttttttgttattgtatggaagataagaaaaattgtgaacaacagcaaaagggattgccacgtgacaatccctaaacataatacattcacttaaaagtagttttatttcgcacctaatgttacttccactgtcttctcttcatattctccattactctgtggaatctgaattgtcagtgacaccttatctcctttggcataatattgaagctgttcctgaagatcatccatgcttgatacggttgttccgtcaattgctgtgataacacttccttttgtcattccgtctgcctctgctccaccgccttttgtgatttctgatacataaacaccttccggcatattcagctgtttggaatattcagccggcacgctcattcctttgatgccaattgcgccctgatctttttctgcaacctttgtctttgttgcctgattcatcagattctggatcagatcggatacatcactgattggaattgcatatccgacaccttctacagaatcaccaaccagcttggatgagttgattccaatcacttcgccacttgcatttacaagtgctccaccactgtttccaggattaatggctgcatctgtctgaatcagtttggcatcactctctgttgtctcaccagtctgctcgtttgtttcagaaacagaacgattcaaagcactgattacacccgttgttactgactgtccatagccaagtgcattaccgattgcaatcgcaggctctccaacctttagctgtgtagaatctccgagtgttgctactgaaattgctttcattgtatcatctgaaatagagtcaagcggaacagccacaacagcaatatcatactctgagtttgttcctttgatattcgcctcaacacttgttccatcagcaaaagtaactgttaatgtatcgcttcctgctactacatgattatttgtaacaaccagaagttctgaatcattctgggaaataatgattcctgttccagcactttcgctctgttgctgtgacacaccaccaaagaaatcctgaacctgctgcacactcatatttgtaattgatacgattgatggcattacattttccacaatacttgaaacatctgaagttacaacactggaagatttggataatgaagcattgctgctcacagctttggttgccgtagtattggtcttcgtcacaccggtcaatccaagcactttacttccaacaacatttgatgccagaaatgtaccactggaaacaactccaaacaatagtgcaaatcctgtcactgccactgctttgggaattttcttttgcggcttcttaccatgcggtgcttgatgcttctgaccaccattgtcatcatgaaatggtgtttcgctctgtccgtttccattcattccatctgaattataataattatattgattctccataaagattacctcttctcttgtttattctttttctttgatgtttacatagtaactccgcattgtgataaatctgtgtataatcaattaataaagattgaaaagaacaatagaaaaacaggatcagaacttccttcttaatccgttctaatcctgtctatatttttcaactacctaatcagtatctttcatctgtctctcaaacttacagatcaatgaaatctacatcataatcatctgattttcttcctttttttgattttttagctgatcttcctaaatttcttgtatttcctgtcggtgcatcatattcatcatcataatcatcatcgtaatcatcatcaaaatcataatcagcatactcttcatcaaaggcatcgtaatcatcattaaaatcatcatcataaccatcgtcataatcatcatcttttacttttttacgtccaaacgcctttctgtctgacttcttagcagtaaccggctcgtcatcttcttcatcttcttcatcttcaaaaggaatatcatactcatcatacagatcatcaagttcctgatttctatgcacaagttttactgcaaacataatcataagaacaagtaatacaactacgatgagtgctcctccagccagaagaacaattggatgctcttttacaagcgactccagttttccaacaatcccttttgcttccttctttgtactgtctgttgtctgaacatctacactctgataagttccatcctgtgaatcatactgatagaaccctttttcacctgttcttgtattcactgcatacagaagatcataacgatcattctctggatttgcccaatatggatatgtctgatctgctactgtaagttccccttcctggtatgaatccggaagttttgctcctccattatctgctaaaagaataatagatgttgtatcagaaatcttcaattctgtatatggaacaaatgtagaatcgtcctcattgtagaggaaaaactttccttctccggaagcatctaccaaatatccaagtgtaacaccagcctcattagcaacaaacttgtgctcttctccattgaatgtctttgtagtctcactatatcctaccggaatcgcagatgttgcaaattcttctgagaagttataatctgttccattcacatttaccgtaatatcagtagctgcgccagttgattcacttccatttgcctcaatctctgttgaaccatcatctgcctgtccaatcttaattgcggaagatccctggtctaatgtcagtgtctcatctgaatacagataagcctttgagctgtcaactgtgatcgttgtatctcccatcttcaatgctttaaacgtcattgtagtacgaagttctttcgccgttccgtctccgcttcctgagtatgtaagcttgccatcactgtctgctgttacaccctctccgctttcaaactgaagtgcagaagtatcataactcattgtaatatctgcatctccaacagctgaatttccagatctcacaacaagatctacacttacttcctctccaacctttgtctgtggatcagagaacatcagagaaccatcagctgcacttacaattgtgctgaacattggcactgtaagacacagtgataatgctactgccgctaatttctttgctttcatataattaccccttcttttgttgtcttaaacttatatactatcctattgtacactgtttgagtgaagttgtctacatggaagaatacattttaaaaactttcaaaactataaaaagaaagataacaatgcattaagcactgatatctctctttttatcctcttactttttcctctgtttttcattttcttccataaatttctttgcatccttcataaaactcagcacaatcaacacaataactgcgccaattgggaatgctgcaataatactaaccgactgcagattactcattgaactttccgaaaacacaagtgcaattggaaggagaatcagcaggatacaccacatcaactgaatcagtctgtttggattctcatcttctcccagtctgtgataactatagcatgatgctgtcaatgcaattgaatcaaatgaagttgcataaaatgcaatcatcgtaatcaacacaagagcaagtacaaacggtgcacaaggcagagaacgtattactccaatgatcattgtatacagatctcccgtcttctcataagcagcgataaaatccatctgtccactaatctgttttccaagagaataatttccaagaacaatgaagcttacaattgttgatccaacaccaaatacatatcctccaagaatggtctgacgaactgttcttcctctggaaatgtttccgataaagaacggagctgccacacaccataccatccagtatgcccaatagtagattgtatagttctgtgggaatgatgttgttctttccgggtctgtaaatgttgaaagctcaaagaaattttgaaccacttttccaagagatgcaaaaccattttcaataatgaattttgtttctcctccaaaaagtaatacaaacaaaagcaatccgaagaacaggtatacgcaggctttcgcaagaaaactaattcctttaaatccatgtaacaaagaataagtataaataacacatgtaatcaaaataattataatcgttacaactgtacggctcagttcgatatgaaacagttcattaataatacttgccatcaaaggtgtcgcaatactaaatgttgttgctgttcccgcaatcagagcaaatactgcaagcaggtcaatgattcttcccagcattccatctgtatgttttcctaaaattggtctgcaggcttcagaatatttctgtctttcacgattacgtacatgaagcataaacccaaaagcaactgcaagcacaagatagaatccccacggaatcagactccagtggaaaattgggaaaacgcctgcccattcacgaatacttccaagttctgcaatgtgtgggtctgtcgcatacatgacccactctgagaaagaataaaacagaatatctgcagcaagtcctgctgtaaacatcatggagccccatgcaaagaaagaatattttggtttttcagtctgagctcctaaaacaatatttccatactttgatgttgctacataaatagataacaggaatacacctaatccaatcacaagataataagttccaaatgtatcaccaaatacatatctaatctgactaagcacctgattggattgttccggcttaaagaagaataaaatacataaaaccacaataagccctaatggcaataatgtaataagccagtcaatcttctttttctctgtctgttttgtctgttttgtctgtttcgtttccatttgctttcctttccgacttaccttgtctttaatcctgatgtataagaatactcatacttcttaccatcacaaaaaaactcaaatcctatcacttctccattggattttactggtttcatctgcgtcatttttccttccggacagttcagtttctctgaaatttcccgaagtactttgctgcccgtacattctttgtactttacatcaaattcccttaattcatcaatactgtcaaactcttcaataataccgacatcatactttctgatatacatttccatttcatccatatgcgccatataaagattttcccagtattcgtcccataactcttcgttctggtatgctttctcaagatatggtatcaattgtgtactgaatttctcattaaagaatacatgacctttcatcacccatgcattctcgccaccaatctgaacccctgtgattttccctgtattatcagtcttgatacaccactcttctgtagcaccatctgcatattcagaagcataaaatgcattttcactttcttccataaatacattttctgtgaaataattgtctgctgagcaaatccaggtatttttcaagtattctctcgcaacatacaaagtagaaaaattattcatttgtttgtaatatggattttcaacaagaatcacatgatatttttctttcagatattcaaacttttctttcaaatatccgactacgataacaatttcatcaattcctgcttctctcagctgtccgatctgacgttcaatcataatttcgtctttcacattcaaaagcgccttcggcgtctccagtgacaatggtgcaaatcttgaggacattccggcagccatgataatagcatttctagtcattttccattctctcctttgcaagcctgtaaaattcttttgcataacgatactgtttcagagaatactcaccaaactccactccgaggattctcttatattcgcaccagttactccataagaaaccacagattgctatatagcaatatatctttgttctgacttcttccagacacccttctgtaaaataagcatcaatcaaacgatcaatctgttctttctcatacaatgcataaattgcaaacatagcaatatctacatgtggatcctgcattcctgaatactcccaatcaataagatatatcctgtcatccacaaagagaaagttatccggaactgcatcaatatgagttaatgtatactctttttcctgctgatcaacaaagaatttcagttcatacattttttcctttgtcttctcataatcgcgataaatggatttctctccatttctgtactgttcatatttttcaatctgctcaaacaggtcaaaggaatgatttactttcagcttctgctcatgtacatttctcagatacttcatgcatgctttcacatcattttcatttcctgcatcacaattccttgcaccctctaaaaattctgtaatcttataccctttttctttcgacatatatcgaactggatcacagattcctttcggaccaatcacctgataaacatcatactcctgacttctattaatcatcttatccgttccttctcccggaactctcatgatataacgcttttcaccacaacggaagcgaaacgaacggttagtcattccttttttcaggggttcaatctctgtaatttctttctgttcacaagaaagcgtctctgcaataatatcaagaagttctgaattcagctgatctgaattctcatcaagatctctcaactgctccaatgtattaatctccagaacatctcctttttttacttctttcggaaaaagaatcattttccctttctccattgctgcatcttcccaaaatgaattgtaatatctgcgatgttctttcatttcactgattttctgttctaaagttcttgcactttctttattgatgtaagcaattcctaccatatgattaccagcttccgaatcaccaactgcttttaattccatctttcgattcatacgaatcgtactatcctcatccggcatctcatcaatcatgtaccaggaatacagttcagtctctgagaaaggatttgttctgcaccaaagatcacacggtacaatatacgcattttccaatctatcttttacctttgccaacgaaaacagattgttctttactgcatattccttattataaaccagctctactccatactcatcgatcaggtattcatactgttctttcataaatccaacaacgatagtgatcttatggattcctttttctttcaactgtttaatcagtcgttctactaaggtttcacctcttacttcaagcattcccttggacacttctgtattaatcggtatcattcgcattcccgctccagctgcaagaatcactgcctgatttggtctattctctgtaaataactcttttgcctgttcggtcaatctataatctgcattcagataaccggctttcacaagttctgctaatgaagtattcactttaccaagtgaataaccagaagcttctgataactgtctttgatttacatatgcttctttttttatgatgttcagtaaatcaagttcttgtttgttcatgtacttttacttctcctttttcgtgaactacaggtagcatagcacctttttttttataatgcaagacaatattttaaatattttaaatttgtcttacttaactagattctcattttacttaatgatataatcattttgaataactgattgattttacgttaataacggggaaactgtatgctacccctatagaaaggagaacatatttgcacaaaaaatatttatttaaaaaaggattcgcattattcaccttgatatttttaactggttctttttcattaacagcacatgccgaagaagaaacagatacagctggctcttctcttggaaaagaagtcatagattcttttaatttctatgagcttgctacctgtgattcttcttctggtcaatggattcaagacagtaaaggatggtggtatgcccattacgatggtagttattccacaaacgcctgggaatgcattaatggtgaatggtatcgttttgattccaatggctatatggtcaccggatggacgagggtctataaaaaatggtattatatggatgagaatggtgttagaacaactggttggaagctaatcgacggacaatggtactattttaattccagcggagtgatgcaaactgactggactaagattaatgggcaatggtattatttcaatagtaatggttattggattgacaataatagctatgaaagagggtctttaaaagggattgatgtctctcagtggcaagaaagtatcgactggactgctgttaaaaaggatggtattcaatttgcattcatacgagttgctcatggttcagagcataaactagatacctattataatcaaaatatgacaaatgcaattgcagccggaatccccgtaggtgtttactattacagcacggccacaactgaaaatcaatcattaaatgatgcacagtttgtaattgatcaactacagggatataagatttcatatccaattgttctcgacttagaagattcctcacaaaaaaatctaagtaaggcacagcttggacgaatagcgaaaacattctttgatgaaattcgtcgagctggatatgaaccaatgctgtattgtaatgaagactggtataaaaatcatatcgatacttcttatctgtccggaattgatctttggattgcacgttataactataaatatgatttatctattcaacggaacatatggcagagcagctgcaaaggaaggatagatggaatttcagaaaatgtagatcttgattttggtttcaaggattatactcaatatatcactccgcgaacttactctgctgaaggatatacaaaggataacggatactgggttaaaaataatactggttggtggtactgccattttgatggaacttaccctgctaattcatgggaatacatcaaaggaaactggtactggtttaactccaatggctatatggtaaccggctggacatacatcaatggttgctggtactatatgaactccagtggtgctatggtaaccggctggacatacatcaatgattgttggtactatttgaactccagtggtgctatggtaaccggttggatttattataatggatactggtatttcatgaactcttctggtcaaatgctgacaaaccaatggatctccggagtctactatgtaaaatccgatggacgcatggcagtttctcaatgggtggataattctcgttattatgtcggtgctgatggggtttggataccataatgttgtaatcgaaattaatccaactaaaaataaaaaggggcagtttttcacgactgacccttttttatccgaaaaatgtgcggaaaacgttgattttataagagaactcctcacttggtaatataagaactccgattgagtacaacaaagactggaatcatttcaaagcttcccctatttttcttctattcctttttaattatatcattcacccgatgtctaagttgcataaattcatctggttcaaccacataatttatcaccacaaccaaaaaaacacttgtcagccccattcctattgcatagagaaaccatgtagtaaaagatgttatttcctgcggaataacatatgttccaaccgtacaaagaattgccactgtaaatacatttctcaaaattcgaaacatggatttttttgcacatccttttaccagatgtcgacttgtatagaacacaatttcaaaagaacgatacccataagaacatactgtaccaagaagaactcctgccatgccgaacttccataccagcccaagagaaaccgtaatatttatcacagcttccaaaatcgcctgatatctcgtttccttataatgccctgctgcgcaaataatcgtcaatcccggaatccttacattttgcataaaaacaattaatgtaaacaaaattccaagaaccggacgtacatactgtacatctgtcaggttaatggtatataccccgacaaaaggcaggatcaagactcccatacaggcaatcacaataaacatgattacaaaatacatatactcataacttgaatagctcttttttagtgtctcttcctcattcttggcgatcacttctccaaatcctgcagtcagaccattcgaaaaagatgtcatcagctgattcacggcattaaccaccatcatatagattccatatacactgacttcaagaagagactttgctcccagacagattgtcagcactgtcgtatcagtattatttacaataataccaacaacctgatgaagcaatgccgcatttttttgtttcaaagcaccttcattcggttctgcataaaaatctaatgcaggatattttcgttttgcatagattttaaccaatacaagacgaagcatgtatacaccggttgcaactgcctttacaaaaagaacacctgctccaatataaatcagaaaaatagaaacaaccatattaacgatcgttcctgctgcctgaatcagtgcaaccacatacccttcctgatttgcagtcaacaaaactctgtatttacctagaaaaaagtaatccactaaagtacttcctgccaagacaagtatcatccagcgcacaagactattctcaagctgtcctgaaataaaaaacggatagacccctataagtaccagtgttaatgccagaaatagcattccggatttattataaaattttcttgtcgccgaaagaattgaattcacttcttccgtctgtttcaacgcaagaggtgtatagagagcaacaactgttgctgttcctactcctgcttctgccagacccagatatgttaaaaactgatttactgaagtgatcattccattcacacttgatccatatgcctcaagaataaaacgtggcaatatcaatccagacaaaagaacaattacctgtaaaagcagacttgccaccatattttttaatgcctgttttcctctcatgagatttcctttcctctactttttcttttattgatgctgatcatgataggtccatgcgtgaggtgtatggtctagataaatcactacgaaagtaacactctcattaaagtggctcataccgtctggataggtggctcacgccacaccggacgggcggctctgccgcacgagaatattcagttaacatttatgcaattatacgctccatttaaatacagtcttaaagtctgtatctatgtcaacgctgaatgctttatgtatatctgaaatgttttttacttcgtctgtttcatagattattgatttaagtcttctctggatactcttatcctccataaacttaatggcattttcaaagtcaacgcgtcctgaacggctgcttcctacaaatgtaagacctttctcaagaatatctcttgtatttataggtaccttgttttccgatacacccataagcataactgttccctgtggattgatatatttaataatattatcaatagcgtagaaacttccctctccacctgcacactcaaaagcatgatccacattaaaaccttcttcaaggtcatcagcaagtattgtctcatcaacaaatgagaactgtgaaagtttacttgtattcttacctataacgattatctttgtatccggatatttcttcttaaggatactgctcacaataaatgcaagacttccgtctccccatataccgattgaatttttatattcatgagaaataagactgaatcttaaataagcatgcattccaacacttataaattctgtaattgctgcaattctcttatctatatcgtcaaaagctactactctgtctgcaggaagatttacgaactctctcataaatccgtcatgcccgctgcttaagaatccaccgccttttccataattctcgtaaataaccttctcttctctgtttccaggtatatttggtatcattacaacagactgtcctactttaaaagttcctgtaggatcatggataacacgtccgcatgcttcatgtataagagccataggaagctttttccttaaaatctttatatctcttttaccctgataatatctctgatcagcatgacaaagagcaagatattcaggtcttataataacctgatctttagtatcaacatcttcatgttttacggatattgtcttaggtgtgatcaactgataaacactgtttaacattttatatcctccataataagtgctgtagccgctttcatatcatcgattgtagtgatcttcatattagaaacttcacctttaacaagtcttacaggaacgtttctaacaacacagattttgcatgcatctgtaaggatctctttttcatcatctgaaagatcattgtaaagttcttttaattttgaaattttaaatgtctgaggtgtctgtccctggaacatctgtcttctgtctggaatagatgtaatcttttctccatcttcagaaacaacaatagtatcaactgcgcttataactgtatcaacagctccgcattctttagccatctcaacattttctcctataattctaagtgtaacaaaaggtcttaccgaatcatgtgtaacgataatattatcctcatcgtctccgtttctcttctcgatctcatcaataatattaaagatcgttgagtttctgtcagttcctcccggaacaaggattatatttttatctgaatcaatgtatttcttaataagatcttctgtataatcaatccagtctggatgaacgcctacataaatctcatcaatgtcaggagaaagaataaacttttcaattgtatgaattataataggtctgcttcctaacataaggaactgttttggcttgtcaattcccattcttgttccttttccgcctgctaatattgcaccaaataccatttttgtttcctcccgcttaaataactttataatggaatatttataactcctgcaacttctttgccaaagttttcagcctgtcttaaggctttttcaaagtctctgtaacgtgttataccacactcttcaataaacatgatcttatctgctgcaagaactgcatgtgtatcttttgcattgacaatatcatattttacgctgctttcgtcttttgcgagttttttatcaaaagaagttttaactttatctgaagtagtcataagtgtaactttaccttcattttcttcaacgtatttaagaacttctgcaagatcagctgttcctctgtattcgtaaataaatttaaggccgtatttctcaaatgctgaaacaccattcattgaagggttaaatacatagagaacaaaattcataaataatacaaagaatactgcaaatataaatgcaataactgcacctttgataattgttcccttattgatagcaacacctttaactgcgatctcatcttcattttcagtatctgttggtgagcttgttgtaaatgagtttactttatttatagttacattttcaagatgagtttcagcttcttttacaagagcatcaaccttttcctcgacaagctcattaaactcttcacttgctgttaaaagtcttacagttacagaaccattttccgcggtacttttaacttcaatcttaccagaccagtagttgctgtctgtatttctaagctgtactttatcaattgaaagatcatcagaaatcttatctaaaactttctcgtctacatcctcaaaaatatatgcaccattcatatttgcataaataagattagcgaaaaattcactaaatggctctaatttctcaccattctcaccgacagaaactctgtctgattctacgttataaacaatatatgtagaatagtttgttccatgtgaagtatcagcatccttatgctgaactgcttttaaaacaaatggagcaagcacaactaaaaatgccgcaagtgcaacaataatgtttttcttaaagtttttgtaagtgttagctaataaatctgctaatgaataattttcaaacattttatttctccttttttaaatcaaagtcctcataatcgcttttcgtataccgctcgagcatggtcgccccgaagaatataacaaacataactatccagaactgaactgtaaataatggcatgaagcttgacataaagctggcacgtggtgtgaacagtatgtcctgaagcattacaagacttaaggccattggaaggaccttctttgcatacgctaacttcatcatagccacaagaatgattccaagtattatactaaatacaaatactcctatatatctgtaatcagtaaaaagttccataatataactacttcctataccatgaccctgaaggtaatcatctcccattacaatataagaaatgttatgggcataactattactttcaaaagcaagttctatagagttattttcaggaagcggagttgttccaaacaacattccccctatatttcctctatagaaataatcaatgattggtccaaatgtataatttttaaaagctcttaccggaagatagcattcatataagtatccttttgcaagaacgccaaagcttgttccctgtttgtaaataaaatctataagaagcgccataattccgtttgttgcaacttccgcatcatctcttaggtagttcatggcacccatgccaagcataagtacgggtactgatgctataataagagttttttccactttgcctatccagacttccttcttatcgctaaactgtctcatacagtaatatattaaggcaaacagaagacttagtataaatgggtttctagttcctataagaaggtatataccatttgacataacatacattgcaagtactataaacgcatgctttttcttaggtttagtcgctagatatacacacattgagaagaacataaacactgatataagataaactatataaggaagtttacttgtaaatgttgcataatagtcatagtaagttgtagttcttctatacatatatctttcgactattcttgcaagatagaacgggaaacttgctccaaaaaaacaaagtgatgtaaatcttatatactttatatgaacttcatatttttgttcttttataacatccacccttggtgttttacttctaagtttaaaattctttcctattaccccgcctattaaaaggcctatcatacttagtataataacaaaaaacgaaaactgatatgtatttgcattatatgtagcaaaactctttgtctgtatataatcaatcattggtcttgaaaacaggaacaaccataaggtaataaagaaaaataactgtattaaataacttttcaattccgttataaaatacatcatacaggctatccacaacgttacaagagcaaagaatataaatttagtcttaccattaacactaaatattataaaaaatgccccgaataaaccaaacatgatccagacgattaaagaataaattcttttaaaattaatattttcaaaatacttttccatttaatcccccttttgattactaaacagctgcctttcgatcttatcaatctgggattctactgtaaattcctctataaactcagccatttcatctgcatcaggatactccctgcctgatatgtaggatattatggcttctacagcttcttcatcagaagtgattatctttccaaattttccattgcatgataactcttttgctccacctacatctgttgaaacaaatggtttcccaagacttatcgcctctacaaacgctcctgaaaacccttcctgataagacatagatacaagtaattttgtacgacttaaaaatttataaggattcgtctgatatccaagaaagtgaacataattttgaagtccgtacttagaagtacgctccttaagttcattatccatatcacctgtacctattaagtataaatgatatttatatcccatttgatgaatcttattaagaagctctaaagttctgtctgtacctttaagcttttcaatacgaccgatgcagcacatgctgtcttcttccatatgcataccacagtcttcctttgcgggtatccttatatcatcaaaattgtatccgttatatatagttgtaattttgtctttatattcaggaaaaacattttctatagactcccttgtcttttctgaaatagcgactatagtatcagctgttccaagatgttttctatggcaacttaaatacttctcattttcaggcatattttctatgcttccatgtatccatgcaatcttctttacatcttttctcttagaaaactgtaaaggtggattcatgatcgtaaaagatatttcaatatcatagttatctttagctacatgtcttcttacaagtccggggaaccagaatcgaagtctccatataattgcctcggctatagatgaatgtttcttactcttgtatggctttaagatattgatgccttctctaagttttggcataggcttatcaaaatgttccatctcaagtatatcaatatcatatttatccggatcaagattattaactatagtagcaaggatcttttctgctcctccgccaagcgaaaatgaccatagataaaataaaacttttttcttattttgcattgtaatctccatgatactcacgataacttctatcaagatcaagtaataaagcgtcgtggtgtgcaacctgtttctctattggaggtggtgtcatataatctccaaaagctgtttttaaatacgcatcatatcctactggaataggcatcttagtatcctcaaaaggtaccataatattactttcaaatgcctctataggatacttcttcttcatgtagaacggacctgagcagagttctgtaataccatcgctgtcttccttagtatacttagtcatttccttctctgcctttttccatatcttataacgaagtttttttcctcttattacaccaagaagaactttacttccaagactcattattccaccatgtttttcaggcactgtctgtgcacagaataaagagtatataagtgcccatataacctgtttctttctgtcgcttttcttctttggatagtaatcaagaggaataacatcaagggcaagtccgtgtggaagatctaagtctacctgatatggtttaacacatgttgtctctctgtctcttatagtaataaaaaggttacggtcaacaaatttataattactctttgacataaaatactgatatttagcttcctgtggccataacttagcaagtttctcataatcttttcttggcataaagaaatcaagatcatcgtcccatggaataaatccgccgtgacgaagtgaacctatagctcctcctccgcataaataacataaaagattatgttcattacaaaactctacaaaatattcagccatctcaagactttttgcctgtatctgttccatattattttcctttcctatttcaagtcgaacatccgtgagacttggcgcgtgattctggtcagcgaagctgacatattcctatcagaatcactgcgcatcctcgcggaacgtttatttcagtcggagattggactcccactgagataaaactcttactttttccagtaagcttttaaaaggtgactcttataagcaatctcttcatcgcttggcttttgcatatagtttccataaaactgagtgaggaaaagatcatagttttccggaattggaacaaccatatcctcaaaaggtacatcaataagtttctcaaatgtacctcttttaaatacttccttcattccgtctttaccaacaccaattgccgcttcgtatttaccatctttaacgctgtatttttttataagcttgtcaattttcttagtaaagaagcgagggtttactgctcctaaagcataccagaatataagtctgcagaaatcttttaatttgctgtcaccatactggatatactgtttctgaatataacagatctgacgaagtgtaaccataagatgagctttcttaataaccttagtatcattaaatcggtcaattgggaaaacatctacgaaaacacttgtgtcatgtggttttcttgtaacatggtttttgataacagtatccttatcaacaacaaccataaagttctggaagtaccagtcacatgtatctttatcaaaaataccgtagcgttcatttctgtcatttataacagccgcttttaaacgttcatagtcttctctgtacattcctatatcaatatcgtcatcccatggaataaatcctttatgacgaactgcacctaacatacttccgtaatgaataaaatatttaatattattttctttacaaattttatctatataacttaagattccaagctgggatccctgcaattcttcttttgttaactgtttcatctctaattcccttacataattattatttacttaaaactacttcatatacgcatcaagctcatgagggtttacctgtttttcaacgggtggaagctgcatataatcaccataatactgtcttaaaagtttgtcatactcttttggacctttaagagtaacaccctcaaacggcatatctattatttccttaaaaggatcaaaatcaagaacttctttttccttaaacttagaagcaagaagacctatatatttaccattgtcctttgtatacttagctgaagccttatctatcttcttggcaaagaatgtaggtgataccggttttaagaagaaccagcatacgcttcttatcatatctttaataacactgtcaccgtaaacgatattgcagtgcttgctaaaagataaaagcttaaagctctcaaggttgtaggtcttatctactgccttcatatcatcgaacctgtccattgggaaaatatcgataaataatcctgactcgtaagtcttatcattacggttatcaactattttagtattagtatcaataacttttacaaagttgttaaagtagtccttacttgttctgtgatcaagaatcttgtaacgtccgttctttggaaatgatgcaataagcttttcatagtcagctcttggcattgaaatatcaatatcatcatcccatggaataaatcccttatgacgaacagcaccaataagtgtgccgtagttcataatatatttaaggccgttttcttcacaaaagttgtgaacatactctaatatatcaagttcaatctgttttacttctttatcagtaagttttttcatttaattaatccctttattcttctttaaatcctgtaacataagagctctgtatataccaacatttacttttaaggcaagagccgcaatacgtctgccttttctgaaaatatggttatctgcgatcttaaaagcattcttctttaaaaatccaacaacatctttatagtcaggaagtttcttataatcatctacaagaagcatactgtcaagaactacaaaatgagcatatgctaatctgaagaaagcttcatccttaagagatggaaattcattattgatataatcaatatatcctgtataagcttctatcatatgaagttttctagggttgtatttctgagttgttatactatcccctctgtggaaataatagtaataaggctttgtaataacaacatatgatttagctgccttaacaaggtcaaggtgataaaaagcatcctcatatatcttgccgacaggaaactgtaatttatctgcaatctcctttttaataagcttattacaaacagatcccggaatcttttcacctataagaagttcctttaaaaacttctctctgtcacactcaaaaacaatttctgtgtcactgcactgtggaacttcctttgtattgtaaacattcatgattccgcatactgcaacatcagaatcagttctttttatctcactgtaaagagaacttatcatgtcaggatgaatataatcatcgctgtctataaatataatataatcaccagtggcatttaaaaggccgtgattacgtgctgatgaaagtcctccattaactttatggcagactttcactctgttatcttttttagctagttcatcacaaagcttaccacttccatcagtggctccatcatcaactaagacaatttcaagattatcatatgtttgatctgcaatagattcaaatgatttttccaaatattttttaacgttatataccggaacaacaacacttatcttatccatgtaatctaccctttactttattaaacatttccatgaacacttcatctttagtaacaataagagctataccgtaatatacacagcatacaataatagtaactgcaatattaagtataaatggaatacccatattcatatctgtaggtattaaatgatttaccaaaaatgataaaggtaaaaatcctacagttataaaagtatattttctaaatgaatgtataactattttcaaatcaacaagattattctttttaatgaagctgtattcaataaataataatatatattcagatagtaaagttgtcataatgtaatactgtggtgatgatacgccaaatgcaaataatatactatcaaatataagattacatataccaccaataatatagaatatagacaacttattctcaaatccccttataaggattacctgtgtacccatgacaatttcaagagcccatgatatagctctaaaagcaaatacctgtgttacgataccaccagccatataacgtgttccatacattataacagttgcgtgaacaccaagagcaacaagtcccataccaataggagccataaagaaactgaaaatactactgctcttatttataagatcctggtaagatttctcatcttcaagacctatatagtaactcaaacgtggaacactgacacttatagcaccactaataacacccgatataagcatgatcattctctgaccattggcatagtatgaaacctgctcaggcgcacctatcttagatacaaaagtaagatcaaggttagtgtagagcattccagcattggcaagaaggaaaaggccaataagtggtttaataagatgtttaaagttctcaagaggaaccttaacaaacttaacatccttctttatccataaataactaagaaaatagttaagaaactggcttgctgacataattatcgcatactgaacaatatcatctgcttctttaacgaatgcaaatatagatactaacataagaatacgtataaaaagtgtcttatagaataaaaacgtataattttcgaaagcttcatttatccattcaatatagaaaatctgggcaataagctgaacaccaagaataagcataagtaaatgcacacttggactcttgctgtaaatcggcattataataatataaaaaactgttgttacagctgtacagaaaagagatatataaaacaatgtagaaaacattgtattaagtttttctgcgttatctttaaccttacttatctcccttataccatagttataaacaccaagtgttgcaaatggtataaaccagttaaggtatgtattagctatgttaaattcaccatataactgtttacttaaaatacgtgataaataagcagtagttataagtggaaaaaatatatttaaaagtcttacaagtgtattggctaacgcattaagccttatatctttcatagagtctctcctatttaaacccctgttcttttttcatatttccaaaatggaagtttcaaaaatcccacaacacttcctattccataacttacatgtaacaagaaaaatagaatcggtagcaacaattgctgccaatatttcttctgccccttcactgccataaatgacataaggattgccagacaactatacgctccccacatgagtttagctaacaaagaatggtgacagactgcaagcgcagatgtcacaacaatgcctcctacaaatgcaaaaggcacaaaatgataaattgctaaacactctgggcacgcctttaatgtcagtgcaacccaatatccatttccatatttctgttttaacattcctgaaagggtacttctagcgtgctgataagatataatctctggtgaatagcaaatctgataaccggctttacgaattctataatgaaattcattatcttctgtccgtcccaactgttcatcaaacccacctactttctccaaaacttctcttcgatacgcaccatgaaaaagagatttgacatactgtttcttttgacttcttctgtaagaagccatactactaccaaacatcgactgttccgcaagaagaagtgtttccttccacggtgtactctcatcaatcatatttggtcttggaccacctgataccatttctccagattccaaaatttctacgtttttcctcacaaattcaggcggaatagacgcatgtgcatctacacggatcataacatcccctgaaaaatttttgattgcaacattccatcctgaagcctgcttttttcctggatttttcaaaacctgaacattcttgaaatcagtcatctgctgttgaaatctatccatgatctcttttgtggaatctgtagacatactgtcgatcagaaccacttccatcttcccatggtcataatcctgagcttggatatcttccaagagttttcccaaaactttttcttcgttataagcaacaacgcaaacagatactatcatcttacatttcccctacttcattacttgatcacagcaatcacggttttaatcattgtactaatatcacgtaagaaactgaacttttcaatctctctcaaattatacaccatctttgccggtaatacttcatttatatatacttcatcagcattctctgcattttcaagaagtttttcttcatctttgtattcaatacttgtacgggaagttactcctgccggtaaaagaaatgttgccatcatttcttctgtatagtgagctgtatacttcggtacttccggtcttgtaccaacaaaagtcatatcccctttcaagacgttaaatagctgtggcaattcatccagacggacctttctaagcagatgtcccattcttgtaatacgtgcatcaccttttgttgtaacctgtgttccaagcttatctgcattattaaccattgttctgaatttccaaattttaaattttcttccgtaggttgtcacacgaacctgtttaaataaaacaggtcctttagaatccaatttaatcataacactaagtacgataagaactggagataaaataatgatcataatcaaagagcatataatatcaaatgctcttttcaatttcaactctttttcatgctcctgtaaaatatcataatagtattttactttatcattctgcattacttttggcaattcattccattttttcatatatactatccttataagtatccgtaactttcactcaaaactacagacattctttaaatgatttaataatatactccacatcttcatctgataacttcgtgtgaagtggaagtgtaatttcattttcaaacattgcataagcgttcgggtaatctttaatatcaaagccaagattcttatacgctgtcagaagcggcagtggtttataatgtacattcgtcgcaattcccttttctgccatcttcttaataatcttgttacactcttctcttgtctttccattcacacgtacaagatacagatgtccacttgactgactattttctgtataatgctcaagaactgtaacattttcatcctttaaagcttcattgtatttctcaatgatttctcttcttctcgcaaggagtgccggatatcttctcaactgtgcaagtccgagtgatgccatgatatcagtcatattacatttaaaataaggtgctacaatgtcgtattcccaagctccaagctgagtctttgccaaagcatccttagactgaccatgaagtgaaagaagcataaactgcttgtataactcttcgttatctacaccatcaatatctctccaagtcgctgcaccaccttcagctgttgtaaggttcttcactgcatggaaagaaaagcttgtgaagtcagcaatacttccgcacatcttgccattctgctttgcacccattgcatgtgcagcatctgaaagaattgcaatacgtcccatcttcttctgaatgtcagtttttggctggaaaagatatttcttttcttctgcaatctcaaatgctcttgtataatcacagattcgtccacccaaatctaccataatgattgcttttgtcttttccgtaactgctgcctctacctgatccatattcatctggtaggaatctttgtcgacgtctaccatgacaattttcgcaccgacatgagcaatcacacttgcagttgcagtatatgtatatgcggttgtgattacttcatcgccttctccgactccaagcacacgaagaattaattctgctgcagctgtcgcagaattcaaacaagccaccttgcttgttcccatatattctgccaattccttctcaaatctctttgtctttggtccggttgtgatccagccacttttcagtgcatcaacaacttctgctatctcttcttctgttatatccggtggtgaaaatgctatatgtctgttttccattatattaatcctccattacaggtttttcatgactgatttttccaagttcacgtaattccttattcacttcttcatctcgtttcaagtcttcctgtctgatatgataagttggaacgatttcggatacgatctgctttacattcaagctttcattcattgctgcctcttccagttctcgtaatccactcaggaaatgcacttcattaaactcaagtggttttccaatatagattagattattatcagtcttctgaattccttcctcttttaccagaagttcctcatacaatttttctcctggacgcaatcctgtatatttaatatccatatccacaccaagtgtatatcctgaaagacggatcaggtttttcgcaagatctgcaatcttcacaggttctcccatatctaatacgaaaatttctcctcccttagcaaacgcacctgcttcaagtacaagtgatactgcttccggaattgtcatgaaataacgaatgatgtccggatgtgtaactgtaagcggacctcctgcagccatctgacgcttgaacaatggaataacacttccattacttccaagaacatttccaaaacgtactgctacatattctgtcttagagtatctattgaatgtctgaatgatcatctcacacattctcttagatgcacccataatgtttgtcggattaactgctttgtccgttgaaataagaacaaatctctttactccgaacttgtctgcagctctcgctgtcttataagttccaaatacattgttcttaattgcctcgttcggactatcctccatcagcggaacatgtttatgtgcagccgcatgataaatcacgtccggtctgtatgtttctataacggattcaatacggcttgtgtttcttacagatccaatcaacacggtcaaattcaactctggatggtttaatttcaactcctgctgaatatcatacgcattattttcataaatatcaaaaatgatcaatcttgatggtttatattttgctatctgacggcaaagttcactaccgatagaaccgccaccaccagttaccatgatgcatctaccttcaataaatccgcgcacactttccagatctactttaatcggatctctcccaagtaaatcttcgatagaaacatctcttagttttgaaacactcacatcctctgtgatcaactggtacatacccggaaggattttcagcttacaagttgtctgattacagatgcgaaggatgtctcttgttactttcggagatgcagaagggattgcaagaataatctcatcaacttcatatttctttgctacatctaaaatgcactctctgccaccaagaatacgaacaccgtgaatcagttttcctttcttgtgtggattatcatcaataacgcctactaccttactgttcaaatgtgcactgtacttcagttcctgaatgatcatacttccggcttcaccagctccgatcactaatgtatgatatacgtgaccttgaggttttcttagtccacttttcaatacccaataaattctatatgaaaatcttgttaaaactgtagtgctgagtagcaaaaaaaagtaaaatacatgaaagcttctcggaacaggaagaactaaaagttgcattccaaacccttggcatactgttgacaagaagcaagcaacgcctatcatcgtcaattctcttaatcctgcaaaagaccaaacactattatacaaatttaaaatcataaatattacaagtgttgaaattattccaataggcaaataggatttcatactatgaatatattcttttggaatccacgaataatgtaattcatatcgaagtattaatgacaaatatgaatgaataataattgttaatatatctactccgcatagtaaaatcattcgatttctggaattatgcaaattaagtatctttttcatctttatatcctcttttataaattgttacgatttttttacatacggttatataataacaaattttatatcattttacaatacatcatcttatctcttttttatgacttttgatgattttttcttattatactcttattttctcaaaaaataccccaaaatagttgaataattcctcgctgactctccattcatatgaccatcataatctgtatattttgtaatatcatgtgaaaacaaatcatagtattccgtattaaaattcagatattctacctcatagaataaaacagcactccaaaaattgccaatccgttatattgatctggatttccaaatatcgcatccacaaacaccgctgaccagtctgcaagaatcatcttcttaaaaaatccccaaaaaatacgctgaattcctctgcaaattctctgtagatcaaaggaatgtccttcgtataattgttctgctaatctactatgtctcccaatcggtccctataaaatttgtgggaaataggatacgaacaatgtataacggaaaatatttttctctgcatgatctcttttccaatatatgtcaagcaaatatcctgatgtttgaaacgtgtaaaatgaaatacctaacggcaataaaatctgcattccaaaattaagaatcagccctatgatcagatatcgttttgctttctttttatcttgattcacttcatgttctatcgccactccacagagataagtgattatcgttgagaaaagtaaaaatggaaagtactttgtccctgcagcaagataataaatttagcttgttaaaagaagcccccaccatcgcatcttttttggaaacaggtaatacaaaagcacagccccggctacaaatataataaataaatttgatactaatgacatatttcttcttataccttaaaagggatgggaacacacggcccccatctctttttctctttcttaattaattattcaagaatactttctgcattcttactgttctagtataagaatccatcatccaaacatgcgtcatctcctgatgaatcggaagaacctgcccccgcatcactgcttggttcacttgctccaactcatctttcatttccttccctgttgaaataactagtatcaatttttacattttcttgagcttttgtatcatcttcacaatatcaacaccatatcctttggcagctgcccatccttttttcttaggattattaggtatacttaaccattctacataaattgcacttcctcgttcaacatacttaaaacgattatctacgcatgtctgatttaaagattttgttgatccatatgccttcaaatgctgaatttgtgcacgtacaccctctcttacatctttaaatgattcacctgaaacactatttcctgttgctcccatgcccgcaaaattatactgctctgctttcacaacacctgtaaattgtaaccaacctgtctctttcatcgcctgtacaaatgcaacttctgctttaattccttctgccacagcttcttcgtaataaatctgacaaaaatctctgattgtagccgccccaccttttcgcattacatcttccggataagctttcttacttgcctcaaaataagctaccatctgatccactgttacttcggtatctccttcaatcaaatacgtcccctcaacaacattagaatttgtattcgaattgtttgtgccggcacttccatttattttgtcatcatttatccctggaatctcatcatatttcttggtagaatcatacattccatcatcattaaagaaataccatgttccatctattttctgccaaccggttttcattgctccatcgtctgctccaccaaagtaataccaatcgccacctacttttgtaaaaccggttcgcattgctccatcattggattcaccaaagtaataccagtttgttcccagctttttccatccagtctgcatgtagccgtcgtctgcactccccaaatagtaccatgtgcttccaactttctgccagccattcttcattgctccatcgtctgttccaccaaagtaataccaatcgccacctacttttgcaaaaccggttcgcattgctccatcattggattcaccaaagtaataccagtttgttcccagctttttccatccagtctgcatgtagccgtcgtctgcactccccaaatagtaccatgtgcttccaactttctgccagccattcttcattgctccatcgtctgttccaccaaagtaataccaagcaccacctacttttgcaaaaccgattcgcattgctccatcattggattcaccaaagtaataccagtttgttcccagctttttccatccagtctgcatgtagccgtcgtctgcacttcccaaatagtaccatgtgctcccaactttctgccagccagttttcattgctccattctctttatcactaaaataataccaggctccaccgattttctgccaacctgtttgcagatatccaccatttgaactacctagatagtaccaggactctcctattttctgccaaccggtcttcattgctccatcattagcttcaccaaaataatacctgtctccaccaatcttctgccaaccgattcgcattgctccgtcgtcagattcaccgaaataataccacttggttcctattttttgccaaccagttaacatatatccacttgaattaaaataataccaattggttcctattttttgccaaccgattcgcataattccatcatctgttccacctagatatgaccactttccactaattttctgccaaccagtctccatatagccattaaaatcaaaataataccagcttccactaatctgtgcccactgatttttcaaatagcttgttccagatgcataccaccaaccagtataatccttataccactgtccctttgacagaccaaaatatttcgcaattccagtcgcatcggcaacaccaagtttcttcagtccagcttcattatttagaaaattatttacatccgatgtattggtcacaaacgcatgttccactataattcccggaattccatgctcctttgcagaaatctgaactgtaaaataatctgaaagagagccatcctcataacgttcattcacagttgtattttttgaataaatttttctttcttccagtcccagcccaacaagttctgactcgatcagtgtagccagtttctttccgtcatttccgacctgtggtttccagtttgtgttcggaatgattatttctgcaccttttgctgctgaagatagagatgaattcaaatgaaagctgacatagacacttgctccagctgccgctgcatcagctactctctgatcaatatcgtgagcagaacttccgcccggatgcggacagtctgctgttgttcttgtcatgtagactgatacgcctgcatactcttccagttctgctttacaatactgtgcaatctttaatgtaaggacttcttctcgtacgccgtttgctgatgcgccaacgtgtgttgaatcatgtcctggatcaagtgctactacaatattagatgactgtgtctgaactccgtcatcactcatcattgctggaatttcctgttctgcctgaacaattgcctcctcgatacttgactgctcagtaacatttccggattcatcaatattgtatgccgcaatatctgctgatacctcttcctcacttaccggctgtaactcttcgattccttcatatttttcatctacgccaaagagtgcttctattccaagatctgcaagggaataatcatatacatttcccgcaattgtaacgtgcagttctgtaacagaatagactcccttttccagctctgtataagctctttcaaacagatatatatcatctgtttcctgtgccgcagtccacacttcttctcctactggtccctgcacagttgcggtcatctgttcaatcccctcggaaccgtctccccaggataccactaccttctgtgtattcggtgtttccagataaggctgatctatgtacatataatttaggcgctgttcagtactggctgcctgatctgcttcatctgttatttcatctactgcattctcatctacatggtccgtagctgtctccgctcccatcactgctgactctgccggagtctcagcccatgccgtcaccggtagcgctgtaatagacattgccgctgtcaacaataataccgtacatttttttaataaatttttcacttttttcacatccccgcttcctattgctttgtcatataacctgccagaactgcaccacttgtctcaaatgtacgtcctgcttctgttatcttgattttctcacactggaagctgtccagatacgtgtttacaacacatgcaagcacttctgtttctcctgttgttcccatggaacgaatataattcccaaattcttcatctacatcaagatctatcgtcttctcttcttcgttcactttgaaagaattcatcccacattccggagtgatcactgacttttcctgaagtaatgaccaaatcttttcttcatttaaagaatctgtctccacatcttctgtctggatctctcctgaactcatattgatagaataaatcttcatgacactttttgttttctccgattcttctttcttatcgtctgtctgttctgtatcgttctttgtatcactcttattttcatcgtctgtcttcgtagtatcctgactttctacctgttccggattttttgtatccgtgctgtctttctttccacagcctgtcgcaagtaccgctgtaaggcagcacatcgcataaaacaacttcctcttatacatttttgctcctcctccactatcgcaaagcaatctgccacgattatcattttatcgcaatcattccactttgtctatatttcttcaatagtttcagcaatatttctatgaaaaatcacgatactattctcaccaccaaaagggacagccattaatgactgcccctaaattattcaactatttttcaccacttttactaatttactattttacccaaataccagaatttgtgaaccagtatgttgtcccgttgatctttctttctccagtatatgctcttccttttgcatctgtataataccaaacgccatgcagcttatgccaaccatttttcagaagataaccattgtcatcatatacatatctttcatctgtgcctgtccatatgcttccggtatacatcgcaccatcccaactgaaactataatcattgtaccaactatctctgactgcttctccattctttatataataccaataagtataattgtcagatttgatagaaaaccatccgtcattcggtttacaaactgctccgtcctgatcaaagaaataatactcgtattctccggtatcttcatccaacacgcctctatatcctgtgcttgtcgacggtgaaaggtaatatctctttccaccataattaagccaccctgtcttcggaattccgttttcaagataataccattggccatattctcctaattgccagccatttgcttttgaaactgtaccatctgatcccacaaacacatattcatgattaacatcatcatatactgttgtgtttgcatacatttcataattccattccttaaagtaatatgtttttcctccgattacttgtcttccttttaacagtgacccattactatcaacgtaataccatttatcaccaactttattccaatccgactttttcacatagccaataaattttccgtcgtctgcaaatttacataagccatagtatcctgtatctacaattccatttgaaaccatgtaacctgatccattaatgtaataatcaccgacccacacatttttcaaaatttttccgtctgttccagcatatctccaactatattctccttcatatcctggtattttaacccagctatttctctgataaaccccctggtgatctacataataatctgcgttattgtcatcgtcttcctctatataagtatttgtgcacattacaccatgactgatatagtaagatccaacccatcctgtatatggcttgccctcactgtaataataccacttgccatcaaccaatgaccaatcattctttttgataggattattttcctgccaaataccattatcatcaaagtattcatacttgccgttatcataatcacccttattataaacccagcacattcctttagccattgcacctgattcatttaagtaataccaaacgtcacctgcacctgatttccaactatgtgtcaataaagctccatcttctcctgcataataccaatcatatccttcctgataccagtcatttttcagaataactccatcggaatctgtatgatagctgttcccattaaagtagaaatctccagtcaccattttaccttcagagtcaacatagtaaagatcatttccatactttatgaactcatttttacgtacacttccatctgcattcatgtaataccaattatttttgtacgtattccattccggcgtatttataagagctcctgaagaatctgtcaggtacaatgtattactatcatgaacctcaattcttcctacttgcatctctccatcatagttaaagtaatacttctttccccaaatgtcataaatgccatttttcaatatatcgccatctctccagaaataccacgcaccatcatacttaacccagtcgtttgtttcctggatcactccagaatcatttgtcatataatgagtttcactgccgtcatgatatgtttctgtaagataccctgaaagcatcgttgcattatacatgaaatagtattttttaccaccaattgttttaactccatcagcgtacaactttccgtcttttgaataataccattctccctcatggtgaatccaatctgacttttgctgaatttcgccactattattggcaaagtaataataataaccatcatcttcccgggcttcaaatactccagttgccataacgccattcccatcgaggtagtattttgaaccactatatgaaaggaattcccctctaagaagataaagattaccgtcactatcttttttataatagcaccatgtttttccgtcttttgttttattccatccttcagttggtgtataaataacgataccatttgaatccgctatataagcttttccgtcttctgtatcaaacgaacctgtctgcatttctccattattgtcaaaataataataatcccctttataaaggtagaatttatctttaacaagtttgttatcaacaaataagtaccattttccgtttgtcttcacccaatgttcctttgctgaagcctgaatcaatgtgattgctccagatgcatccgcctgatacaactgtccaccaatagtaagttgagaatcagttactagaatcccatctgaatccaaatagtattgtttgccatatttttctacaacttcatcctctgctctaatgaaatcctttttataataattccatgagccatcctgattctgataccaatcatcgataattaaacatccattttcatctgcccgtataattccatcatgcgatttttcattttcatccgtgtattcaacccattcctcactatcgatcatcattcttccagaccaatcgaaatagcatgaatattcaaatccggattcgtctttaaagtcgcgaatagtatctgttactttttttcctgcttcataataatatacactaccgtcttcttcaacaaatccatctttcacttcttcatcaacatctagtgattctgtcagattcttgtccgaaactgtttcatctgttgatgtttcgttttctgtatcttctgttatgttttcagacggctcgtttttctcttctgaaaatactttttcagtctctgactgttctacatctgcatttgattcttccttttgttctacattgctctcatccgcttcttcgactggtgcttcctgatccacagccgcttcctgtgtagttcctgtagcttgattctcttctgccattaccggagtaacaagacttgcactagtcgctgctacgcaaagtaaagcaattatcttttttctcttcatatgggaacctccttatacgatcttgttatatcatattttcccacaattcattatatttgtaaatactttttgtctttttagtgttttatctgtgaattttttttgttttttctcatttctttatatttttttgttttttcgtaagtgcctcaaaacaaaaaaaggacagaaaaacgagaatcatctctatttttctgtcctctgatttaattcaattgttcaccttccggcaacactccgccttcttctacaatgtttgccagatcaataatattctgcacagaagattcaaccggttccataataaagagttctgtatcaccactggaataacatgtaccagttgtatttgtaccttccgctgctacagactgaatcgtccaagccggattattactcaactgatatttaatcaatgcgttaatctcttcctgagacatatttgtctcaacatctttgctcacctgttccataatcgcattcgctttcaagagcatagtcggtgacaaacacttcttcaacatagcagtaataactgcctgctgatcttttcctctctggttgtctcctcctggaacattgtgtctctctctgcagaaagcaagtgcttcttcaccattgaagtgattatatccttcctgtacatccattacatgttcagaatcttcacttgttgtaaacgcatactctgaatatacatcaattcctccaagtgtatctacaatatcaattaatgaagtaaaattcaatctcgcataataattaatatccgtctcatacaattcacccagtgtacgcatggaggcatctactccgtaaatccctgcatgagtcagtttatctctctgaccgcctgaaatctttggaatcggtacatagtaatcacgcggagtagttactaataaaatctgatgtgtctgcggattcacaactgcaataatattcacatcacttcggcttgtttctgatacatcaccatagacatcaataccactgatataaactgtaaatggttcttttataatactgtcatctgttgctcctgttgaatttccgaaatccaactcaacacgtatattaaatgtatacaacactttcactttatcgctatagccatctactgcttcttccatcagacttgtatatgcactgttataaatgattgcatcacaatctccatcaatcagagcctgtgcctgatcctgaacggaatcatactctttcacttcaatcgtatcaacgccaacttgcttttcaatatcagctacagctgtctgtatattgtcagcacctttctcaaactgtacaccatacgtatagtctgccgcatcttctattgtctctgccgaatcatctgctcgcactgcaacaaccatcttatctactttatagttgctgcctgtgatctttccaatcatattattagcctgagcgacataataacttcccgtaaacatcacaactgccataagtaaactgaatacttttccccaagtcccccgttttctccttgccacctgtgaattcagtgtcacacaccataagaaaaacagtattgctgctgccagtatcagatacttgtccggaatcattcctaacaaatacaataccgccattaaggctatactggcaatcgtctgaagaatgatacacaaagtccccagcttattacttcccgatctgcgggaatacttatttgtacttttttttctgcgtgcagaattgccagcagatccttttcgttttgccatcttacatcccttttcttaaattagaacaattttgacgggtaaactccttcttcaatcaatccacgaagcgctactgttacagattctttatcttccttatatgtcacaccaaaccactggtcatgtgactgcagtacttttacttccagttttccatcacttaacagatctccaatcattgtcggaagcagatattctgcttttagatctgtactttctgttttctcaaggaactcatcaaatcctgtcttaagaatctcaaaaaattcaggtgtaattccccacatattcatagataccggtgaatcaacatcaaggaatacatctccatcctctttgtggattacagcttttccgtcttctttttcgatgttatgtgtctcttcaatgtctgcaagcatgccatgtccgtctacttcgcacacacctctggtcacgcctccgttatcactcaatgtatttttcaatacaaagctgaccatacaaatctgcattatatcagcagatggaaggtttgtcaaataactgtatgcctctttaaatgcttcttttccataataatcatctgcattgattacaaggaatggagcatccaccacatctttacagcaaagaattgcctgacctgttccccaaggttttgttcttcctgtgaattttccgctgaatttttctgaaatatcatcaagctcttgaaatgcatatgctacttctacttctttttcaatacggttgccaatgatctctttgaaatctttctcgagatctttgcggataacgaatacaactttgtcaaaccctgcttctaatgcatcatagatggagtagtccatgataatctctccatttggtccgattggagccagctgcttgattccgcctccaaaacgacttccaatacctgccgccatgattactagtgttgctttgctcatttctttttcctcctaatgtctcttcactgttacaatataccagtttataaacaccacttattctcccaatccatctttcacaagttgaaccatgtctgaaagtgctatttcttcgtcttctccttcacaaataattgtaatctcatctccgctttttatgcatgcacccagtacgcttaatacacttttggcatttgcatttacctctttgtttttcatctttttgtacactgtgatcttgctcttgtactgcatcgcagttttacaaaacaatcctgccggtcttagatgaagtcctgtcggatttttgatcactactttatcgcttaccatgttattctcctattctatctctctgatagttggaagttttaactccaatatcatataatatgcattgaaaactgtcaatgccagccttcttaattcttttttaatttagacctgtacttttttaattaatatgaagtattattaatttgtcccagcgttattttccggttgttcatcctttgtggatcctttttcagtcaatataagctgcactgtcactggttttgtcaacgttactccatccggaaggtctacttctaccggtatgtcataagtgccttccttcgtgtaattctggagatttaccgatactgcattgctgatatccagactatccagcgtatctttctctccctgaaatacaagtgtcacctcagcatctggctcgtaacttacctgaagattttttgccagataattctgtttgatggacgcaaccataaactcaattgtacgatttcccaactgttcgatcattgcagttgcggtaacctttcctgaagcgccttcaatcagttctacaccttccggcagataatctgtaatgtcaaatgctttctctatcttctctgttgccccagcgatagacaattcagatgctggaatattgatactttcaatcttggataaggcctcttcttttccgcagatctgcacgctcgccggttcgctcgaacaaccgagatattcatatccatctgccggtgttccagatgcttcaaattttaatggaaccgtcttgattctcattactgtcacatctacagtgattccatcttctccaagattattacttagctgtccctgattgattacatttcccgatgcatcatataaaacaagttctgctgtaagttcttcatcttttgaaattccatctacattaatcttcgctacggctttatcaattgattttactgttgattctgctcctgtaatcgttattttttcaggattaactttcatctctccaatctgataaccgtcacgctgcgttcctgttgtgctaacagtcagtgtaaatacagtcttacctgttggttctgtcttaatctgtatatttctcggagcagcctctgccgactgataagatccactatactttggaattgatactgaaattggtatcaaccctgtcctggaatccatttctttgatatccgcagtagccacaatatcatccgacttaatctgttgaatcactgaacgttttgcgtaaacaactacgtttacattctgatcatctaaaaccgtataaacttccccaccttgtgtaatcacatcatcgttcgctatcgtaactttgatgtttgtataagttgatttcgtaaccggattagcaacattcgcaacaatcagccaaagaaatgctgcaaaaacaaatgcaataatcttaagcggaagattcgttgtcaatttgtattttttcatgatctgtgccatcctttccgtatagaaaacttgttctttgtctctgtctttctatactgaatctggcttaactgactccgaagttcttctgcgttaatagctcgaagcaatcgtcctccggaagccacagaaacaagtcccgtttcttctgaaacaacaatcacaagagcatcgcaaacctcgctcattcccaatgccgcacgatgccttgttcccagatctttactgattgtcatgttatctgaaagtggcagataacatgttgctgatgtaattctgtcccctctgataataaccgcgccatcatgaagtggggtgttgtgttcaaaaatattgatcagcacctgagaagacactttacaatcaagctctatccctgtcatttcatactctgttaactgaatcacctgctctactacgatcagtgctcctgtacatacgcttcccatggcataacaagctcttacaatactatccagtgtttcatccgaaaacctctgattttctttatttttatcgaacggattaatgttactaaataaattcttctcccccagcttctccaatgcccgtctaagttctggctgaaaaacaacaattgctgcaatcgctaatacattaatcgactctcttgccagatacaggatcgtattcatttgaaaaagccatgccagaagaataaatccccccagcataagcattcctcgcagaagcatccaggcttttgtgttcttgatccagagcatgatttcatagacaataatcgtcacaatcagaatctctatgatatcttttatctgtatatgtggaaaatacattccatttgaataatttcttataaaattctgaatccactctatcatctcaagtctcaccaccttatgtaatcactcgttgttatgcactcttgcatcttttgctctgtcgatcactcttttttctcttcattctgatccagacccagttccttgctcagacttcttgttaaaagaatatcttccgtcatgtttgaatcattaaaaattgttgtttgtgcaagatcagactcctttttcagttgttctgactgatcttcttcctctttctgttcaacttccttcaaatcagaaacttctgacacagcagtattgttttctgtctctgacacattcggcatctctgcgtcctgcccctgatgttctgtaatatgttttacctgcttctcaggcatctgaacccctactttcggaactgcctttacataataatagtattcgtcatcttcaaactgaacattctctgttcttgaataatccacagagaaaaaaataacttcaaggaacaatcctattacaacaccaagaatcccactgaaaatcatcatcgtataagacatgtgaagtccaagagaaatatttcccgatgcacctacgatcacacaaactgctgctcctgttgctgatgctatcttccaggaatgatcaactgcccgatttttaattccgttcactaccagtattccaatcactactgcaaacagcataacccacatttcttgatagcctacaaactgttttgtaaaattggttaaagtgctgatcattgttgttccatctgtacctttcaatgctgttgcagaagctttgatcaggtaaagcagataataaacaaggattccgcaggatgcaggaacaatccatattgtagtacctaacagcccaaatataaccggaatcaccagtggtattttcatgccgaaagctactactgtcagcagaatcagccagctcttctctggggtaaatcgaaagtagaaaatatacattaacaaaaacagtatcaccgcaactccggctattggcatagataatgtatataaatgagccactattaacacagttgctgctgccgtcattactgctagagggagaaatgtacagactactgctaagccaacagtacaaagaacagatgatgccatcttcataaatccaatattagaattgatcaggttaaacaccaaaagtgcaagcaaaaactgtgctccctttcgaaccaagagagagtgagaaacataaatctgcttaaatctttctctaagaaccaataaattgttcattgctcattcttctcctttttacacatcttctctaaacgggacaaattacgataataacgttttacattctgtttggcaactgcatgttttctcttataaaaactatttgcgcaaaccccatatataaccaaaagaactatatagcctgcaattgctgcaatcaagagaacgaatagttttaaaattgtcagatcagcagataaactatcactcgaataaatgcagaaactaacgaacaaaattgcataacctattgttacccaaatcaatgtaatccatctcttaagacttgcataatcttttctgtaataatcggcaattttaaaatcatctctgtaattcttctcatatatcgacatttttgtcattaaacgaatcctgtctttatctaacatatccgacattcacctttcaagatttctctcctaagtataccatatgttcagatgccttgtccaatgcttagagtcaaaaagtagacatttttaacacctgcttttttcaggattcctgcagcacgttctattgtacttccggttgtgtaaatatcatcaatcagaagaatgttctggcgtggattccacgattttgaaaccgcaaatgcccccttcagatttctgtgtctctgctccccgttcatttcctttaaaggccgggttttcttaatccgatataaaacatctttttctataggaattcccatgcattctgataactgctttgctaaaagttctgcctgattatatcctcgttttctcattttcgatctatgtaacggaattggaataattgcctggatcccccatcttcgaatctgaaattcaaactcatctgccagctctttcccaaagatttccgcataatatcgcttgttgtgatatttcaaccgatatagtgaatttgaaaccggcggaatgtgaacccataggctgcgtccttgttcataattactttttcttctttcacaatccctgcaatactctttcgtttcatcctctaatggctttccacaatggatacattttatttttcccaccttaacaacctgttttctacagtcaccgcaaataccttttgagctgatttcctgacaaaacgggcatcttttcggatacattttttctaaaattctttgattcgctcgtctaagcttgtaaatcttccctgttcgcttttgttttcgatcatttcctgaaatgttagttcactccctactattgttaaacatctttttgcccgcgtcactgctgtataaagcagattcctgttatatagtaactttggtcctggaagaagtgggataatgaccgccggatactcgcttccctgagatttatgaaccgtaatcgcataggcaagttctaactcatctgtcatatcgtatccatattttacctttctcccctcatcatattccacgataacagtttctgtatattcattgatttcatcaatgactcccatatcaccgttaaaaactccaattcctttgtcaactgttaatccaaatctggtagaaacttcccactctaattgataattatttttaatctgcattactttgtcaccttcacggaacaatctaccattaatttctttctccgttttttgggaatctgaaggattcagatattgctgtagaatcacattcaatcgttctacacccagcaatcccttacgtgttggtgtcattacctggatttcatttggatcggcctgcacatatctgggtaatttcttctgtattaaagtaataacgacgctaatgatcgtattcgcatcctggcgttttaagaagaagaaatcccggcttttattatcaattgtaaccggttctcctgcattgatcttatgagcatttactacaatatcactctctcctgcctgacgaaaaatctttgtaagtgtcactacgtgaaatttttctgaacgtatgatatcttttaacacacttcccggtcccacggacggaagctgatccacatctcccacaagaataagtcttgttcccggaataactgctgataaaagcgcatgcatcagattcagatcaaccatggacatctcatctataatgataacatctgtctcaagtggattctctctgtttctcaaaaatccacctacactgttctcttcctcaggatttccacttacttcaagtaatctgtgaatcgtctgggcttcatatcctgtagcctctgtcattcgctttgccgcgcgtcctgttggcgctgcaagaaggatactcattccttcgctttcaaaaaattgaatcatcgtattgatcgttgtcgtcttacctgtacccggtcctcctgttaatatgagcaaaccatgtttaatagcttctataacagctctgtgctgcattggatccaattctatcttttctttctgttctactcttttcagacgtttctccatcatgtcttccggcatctgacagtcaatatcaagatcattaagcattttcgcagtattcaattccaagtaataataatgtgccggataaatgcgaatttcctcatccacttctttcataactgttttccgctctatacacagatccatgatgtacttctcaatatcttcaagatcgactcctaaaagtgcatttgctcttcgaagcaatatattctgtggtaaataaacatgcccctcacctactgcctgttgcaatgtataaaacaaaccacttcttatacgatagtctgaatctgtatgtatgccgattttggatgcaatttcatccgcagtcttaaatccgattccttcaatattatctgcaagctgatacggattttcttccaacactttatacactttcattccgtaatactgataaatcttggctgccagctttgtggaaataccgtatttctgcagataaatcatggcttttcgcatatctttcttttcttcaagctgagatgcaatctcctgtgcttttctttcactgattcctttgatctccgcaagtctttccggctcttcttcaataatgcggaaagtatcctctttaaactttttcacgattcggccagccagtgccgcacccacacctttcactgctccggagccaagatatcgttcaatagaaacaatatcctccggctcttttactttataatgagaaatcttcaactgcttaccgtaaacattatgattcacatattctccttgaatttcaaggagttctccttcattaatatagttcagacttcccacgcatgtcacttcaccatcgtcatgttcaatatgaaatactgtatacccattatcagaatttctatatacaatatgactcacataccctgtaactgtttccacactttttcctctctcttcttgtatcttttcctaatttatatgcagaaaaagggtgtgttcctcttatacacacccctcgtaattgaatcttcttctctaagaacctgacacttcaaattctttttcagaattctttctcttaaaactcttttcttccactcataaattccacaaactgtccggtaccaattgcaacgactttcatcggatcctccgctgtcatcgtattaattcctgttctctcttcgatcaattcttccagtccgcgaagaagtgctcctcctccggtaagaacaattccccgatcaaggatatctgctgacaactccggtggagtctgctcgagtactccgattacagcttctacaatctgtcctgtagattctctcaaagcttcttctgtctcagatgaagtcaccgtaactgtcttcggaagccctgttaccagattacgccctctgacttccatcttctcttcctctacaagtggataagtcgttccaattttaatcttgatatcttctgccgttctttctccaatcagaagattgtgtttctttctcatatagcgtacgattgcttcatcgaaatcatcacccgctatcttaattgatgtattcacaactgttccacccaacgaaataactgcaatatctgctgtaccgccaccgatatcaacaatcatatttccacaaggctttgaaatatctatccctgctcctattgctgctgccacaggttcttcaatcagatgaacttctcttgctccggctgcaaatgtagcctcttccactgcttttttttctacttctgtaacaccacttggtacacagatactgattctcggcttcttaaatgtacgttttcccagagctttctgaacaaaatacttaatcatcttctccgtcacggtataatcagagattactccttgtctgagtggtcttaccgcaataatattccccggtgttcttccaagcatcaaacgcgcttcttcaccaattgccttgatcacattcgtatcacgatcaaatgcgacaactgatggttctttcagaacaaccccttttcctttcacatataccagtacactggctgtccccaaatctattccaagatctactgacatcataatttttatatctcccttctaaaacgctcttttgctgttctcagcactctactgcaaataaacaactttgtctgttactgattctagcattctctttcctcaatcaagtgtcttttttcccttgaaggggtttatcgttactgtttttcactcttgctgttatcaatattatgtaaccaaaacagtaatgttttatcatccgcatactttagtataatagacttcgcttaaaatagaaaggcattttttgcatatattttacgacttttttcgactttttttcgtctttatttctccaatatagacgcaatatatttccctgtataagaatctggattctttgcgacctcttccggagtaccacttgccacaacagttcctccgcggtctcctccttctggtccaatgtcaataatatagtctgccgtcttaatcacatctagattatgttcgattacaattactgtatttccatccccagaaagtctgcggagaatctctgttaatttatgcacatctgcaaaatgaagtcctgtcgtaggttcatccagaatatataccgtttttccggtactgcgtttgctaagttctgtcgcaagtttaattctctgtgcctcgccacctgaaagctctgtagaaggctgtcccaaacgaatatacgacaatccgacatctctcaacgtctccatctttcttcgaatacttggcacattttcgaagaaatctaccgcttcttccactgtcatattcaatacatcataaatatttttccctttatagcgtacttccagcgtctcacgattgtaacgctttccgccacagacttcacatggaacataaacatccggaagaaaatgcatctcgattttcaggattccgtctcctgcacatgcttcgcaacgtccccctttaacattaaagctaaaccgtcctttcttatatccacgcgcttttgcatctggtgttcctgcaaacaaatctcggatcaaatcaaatacgcctgtataagtagcaggattcgaccgtggtgtccttccgattggtgactggtcgatattaatcactttatcaacctgctctagcccttctattctcttatgttttccggggattgttcttgcccggttcaagtctcttgcaagtcttttatataaaatctgattcacaagagaactttttcccgacccagacactcctgttacacaagtcataactcccaaagggaattttacatcaatgttcttgagattattctcttgtgcaccgactactttcagataacctgtcggcttctttctttctgtcggaaccggaatcctgattttcccactcaaatacgctcctgtgacggaatttggatttttcataatttcctgtgcatttcccacagcaacaacctgaccgccatgttctcctgcccccggaccgatatctactatataatccgctgccagcatcgtatcttcatcatgttctactacaatcaatgaatttccaagatcacgcagatgtttcagcgtcgcaagaagtttatcattatctctttgatgaagtccgatactcggctcatccagaatatatgcaactccgaccagacctgatccaatctgtgttgcaagtcgaattctctgtgcttctccaccggaaagtgttcctgtcgcacgcgcaagcgtcagataatccagaccgacatccatcaaaaaactgattcttgctttgatctctttcagaatctgattaccaatcaactgctgtgtctctgtcaattgaagttcatctaaaaatttctgaagccgttctatagaaagtgttgtcacttctgaaatattcttatctccaactgttacagctaaagcccccggcttcaagcgctgtcctttacaggctgaacatggtgtaatattcataaatgtctcatattctgctttcatcgtctgagaacctgtctcacggtaacgacgttccacattcttgatcaatccttcaaatgcaaccggataaatcccttcgcctctctgacctttataataaaccttcacttcttttccatctgttccataaatcaaaacatcatggatttctttcggatagtcctcaaaaggggtatccagatcaaaatgatattctttacacagtgcatccagaattgcacgtgtgaagctgctcttgtctgtacaggactgccatcctaaaactgcaatcgcaccttgattaatagacaacgacggatccggaatcatcagttcttctgaaaattccattttgtatccaattccaaaacattccgggcaagcaccaaatggattgttaaaagaaaaactgcgtggttcaatctcatcaatactgatctcacagacaggacaggaaaaactctgactgaaattcagaggttctccatcgatcacatcaacaacaagcagaccttctgcgagctcaagtacattttcgacagagtctgtcagtcgtttttcaattccaggttttactacaagacgatctacaataatctcaatattatgcttgatattcttatctaatgtaatttcttctgaaagttcatacatattgccatccacacgaacacgaacatatccactcttttttgcacgttcgaaaagctttgcatgtgttccttttcttccacgtacaacaggtgccaaaagctgtatcttcgttctctccggaagcgccatgatctgatccaccatctgatctaccgactgttttgcaatctcacgaccacatttcgggcaatgcggaattccaactctcgcatataataatcgaaaataatcataaatctccgtaacagttccaactgtggaacgtggattgtgattcgttgatttctgatcgatagaaattgcaggtgaaagcccttcgatactttctacatccggtttctccatctgaccaagaaactgtcttgcataggaagacagtgattccatataacgtctctgtccttctgcataaattgtatcaaatgcaagggaagattttccagaaccgctaagtcccgtcaaaacaaccagttcatttcttgggatatctacatctatattcttcaggttattttcattcgcgcctcgtatcttaatgtactgtctggcgtccattttcttacccattttgtaatctcctattccatatcattgagcatcttttttaattcaacaagcttatcacgaagctctgccgctgcctcaaagttcaattccgctgctgccttcttcatctgtttcgtcagatccgcgatcagtttctccagttctttctggctcatggactccggatctttttcaagccgcatctcttctgccgcaacctttttagagatactgatcagatcacgcactgacttctgaatcgtcttcggcgtgattccatgcttttcattgtatctcatctgaatctcacgacgacgctgtgtctcatcgattgccagctgcattgattctgtaatcttatctgcatacatgattacatgtccttctgcattacgcgctgcacgaccgattgtctgaatcagcgaagtctctgaacgaaggaatccttctttatctgcatcaaggattgcaacaagagtgatttccggaatatcaagtccttctctcaagaggttgattccaaccaacacatcaaacacatccagacgcatatctcggatgatctccgtacgttcaagtgtatcaatatccgaatgaagatattttacacggattcctacttcacgcatataatctgtcaaatcttctgccatgcgctttgtcagcgttgtgacaaggactttattcttcttactgatctctttgttcacttcaccgatcagatcatcaatctgtccttctaccggtcgcacttcaacttccggatcaagaagtcctgtcgggcggattacctgttctgctcgaagaagttcatgatccttctcatattctcccggtgtcgcagatacaaacatcacctgattgatcttactttcaaactcatcaaagttaagtggacggttatccttcgcagatggcaggcggaatccataatctaccaatgtctgctttctcgactggtctccgtgatacattccaccaatctgcgggattgtcttatgtgactcatcaatcatcataataaaatcatccgggaaataatcgatcaatgtatacggagcctgtcccggtcgaagccctgccaagtgtctggagtaattctcaattccggaacaaaatccagtctccttaagcatctcaatatcaaaattcgttcgctccgcaatacgctgtgcctctaaaagcttgtcatttctcttaaactctttgacacgttcttctaattcttcttcaatatctgccaccgcacgtttgatattctcacggtcaaccacgtaatgagatgccggaaagattgctacatgtttcagttcgtccttcacttctcctgtcaaaatatcaatctctgagatcctgtctatctcgtctccaaagaattccacacgaatcgctgtgtcactctcatatgccggaatgatttccaaaacatctccacgcacacgaaatgtaccacggtggaaatccatatcattacgatcatactggatctcaatcagctttgccattacttcatcacgatctttgatcataccaggacgcaaagaaactaccatgttctggtaatctaccggattacccagtccatagatacaagacacactggcaacaatgatcacatctcgcctctccatcagtgacatagttgcggaaagtcgaagcttatcaatctcgtcattgatggacgaatccttggcaatatatgtgtctgaagatggaacatatgcttccggctgataatagtcgtagtaggagacaaaatattccactgcgttatttggaaagaactctttgaattccccatacagctgcgcagccagcgtcttattatgtgcaataatcaatgtcggcttgttcatctgttgaatgacattcgccatggtaaatgtcttaccagatccagtaacgccaagcaacgtctgacactggtttccttctttgaagccttcgaccagctctttaattgcctgcggctggtcgccagttgggttgtattgtgatactaattcaaaatgatccatgtaatttctcctgagcgctctaatttagaggtgatattttagaaatagtagttgttttcttagtattgttacttgtatagtatatcattcaggagaaaaaaagtacagaactaaatcgaatgtttgttctgtacttttacatcttagcttgattctacatacctttaaaatgtatctggatttaaagtcaaattttttatttcgttgacagaataaacttttgagatatataatatttttattacatttgtaagatttggaggaatatcacatgagcaatctgcctcaaatttcagaagctgaatttgaagttatgaaaatcgtttggaaatacgcaccaatcagcaccaatgaaattactgaaaaattaacacaaatttccagttggagtcctaaaacaattcagacattgattaaacgtctcgtttctaaaaaagcactaacctatgaaaaacaaagccgggtttttgtctatactccattggtcaaggaagacgaatatattcggcaggaaagtaattcttttttaaagcgatattataatggtaatatcacttctatgcttgcctcttacattgaggatgataaattgtctgaagaagacattgccagcttacggaatcttctttccaatcattaaccatgggaggagcatattttgatatattttagttttcgctttttactctgtaatgccatcatttgtatttttttaggtagtttactgggattaaaaaatttattgcaaaggcaattatccgcacgtatgcaatataatctttcgattatatttcttgccattctaattgttccctttttaccgataaactctgccccatcttctatatcgtggagacatttgctgacagccagttcaagtaccaatggtgacattcaaaccacttttctttctggtaatggttataatttggataaaataaatgattttgctgtctctgtcagcacccaaataccaacttttattcacacattacttgtatttttctggagtatcggtatattcataatgttttttcttctctaccgctcagtaaaacaagtaaaagccttacatagttctgctttacctcttcaaaatgaagaactcaacgctctttacatagaatgtttaaacgaagtgaacagcaagcataccattccgatttatagtacagcatttttgaaatctcctgttttggctggtttcctgcatcctcgcatttatcttccaattcacttgatttcagattttaacgctgaaactataagcgcaactgatattcgctatatgcttcttcatgaactgcagcactacaagcataaagatattctaattggatatttgataaatacagtaaatgttttctactggttcaatcccctaatctggtattttctaaaaagaatacgacaggaacgggaacttgcctgcgacagtgctgtattacaattattgaaagaaacagaatacaagtcatatggaaatacactgattaactttgccgaaacaatagctctgtctccattccctcttactatgggaattagtggaaatataaaacagttaaaaggacgcattttaaatattgcatcattccaccaacctacttttaaacaaaaaattcgtggatatcttatatgcatattcgtctctactatcatcattggatgcattcccatactttctgtttatgcttctgatcagactgggtatcattttgacacaaccgaaaagaatattactcagctaaatctttcttccaattttggggactacactggaagttttgttttatatgatcagtctgctgataaatggaatatttataatatggagcatgcttccacacgtgtatcaccgaattcgacttataaaatatatgatgcattacttggcttggaatctggaattattacaccagaacattccactttcacatggaatggagaaccatatccttttaattcatgggaagccgatcaagatttaacctcggctatacataattccgtaaactggtattttcaggcaattgattcacaggcaggttttgaagccgtaagaacatttttacagacaataaactatgggaatcagaatactggaacaaatctaaatctctattggacagatttctctctgaagatatcacccatagaacaggtggaattgttacaggatttctatcaaaataattttcattttgacagtaaaaatatccaggcagtaaaaaaagctctgctgctttccactacttcttccggttctctttacgggaaaacaggaactgggcgtgtcaatggtaaagatgtcaatggttggtttatcggatacattgaaacagcgaataatacttactacttcgcaacaaatattcaatcctcttctggtgcaactggaagtcaggctaccgaaataacagaatctgtactttctaatcttggtatttggaaactatgagaaacacgctctgcgagtttctcaagttatcgcggcagtcgccaaggtctcgtgcaagcacggactttggctcgttgctcgcgtaaataaataaagagaactgatagcataatttcctgttatcagttctctttatttcattcttctctactgatcaattctgcaaattacctaaccggtactgatacctcggtatattatcaataccattatctaaaatcctgtttccaacatactgaatcgttccatcatcctgaattttcatcgtaagttcgtgtgtaataacagcatcattacatacaacagaatcacatactgcatgaattgtcaaaacaatggttccatcttcattatgcctgacttctgttacttccggtaaagacaagccaaaatgtgttggtgaataattaccacatcccaatcgttcccagataaacatattactttgttcatcgtagaccgcccattctttcaattcttcttttgtaacaggaagatatgtcataattacattttcgaactcttctgctggaattcccacaacctctttttctgccgtaaatttttctccatatttcatttgataaaaatattcataaagtccattataatccaacccctgcatatcctccgcattccagtttgaacataacagattgtttccctgatagccgaacgtactcacatatttttttgaatattcccgacactcctcactcaaaggctttacccggataatacaacttccatctacaatctctgtcacttccggtggttcaggtacgcataattcataacagaaattcccattttcagtatatgcccattcttttatttttgatagcgatatgtatgtaagtacaggctctgtatcctcactccagatcatttttgcggacatcacactcatttcttttccatcataactatattcttttctggtaattccaccatctgtatctgcttcatataaaattacacttcctttttcttcttgttctgcagattttaaaaattgttccatcttctgataattatccataacagaataatgatcggaaccaatgaccggattcccattttgtttgataatttctttcatccgattcatcatttgctcagcagtattctgatctgcttcttgtattccattatattcagaataaatatctcggataatgcccataatttcttcacaatcgttcacagcttcctttttcttgtcttcatcgattggtagattatatcccttatccggattttccatggtagtgtttttttgattcttctcattttttacatctgtgctgtttaacgatatcttactttcacaggaagtcagaatcattcctatacaaagtactaacaaaatactttttcttttcatattgccccctaattattactgtaattctcttcccactcttcttctgttaaccttggcatataccaccctgcatttgcattttgatctgacctgattactttatttgataaatactggaaacttccgtcttccatagattttatcatcaattcactggtgattgcctgatctaacattctgatttcccatactgcttctatcgtaagttttaatgttccatcttgtaatttttcatatgatataacttccggatatggctcatatgggaattcacaatcatataaccctcgcggtctgtatctaaaagttctattatcagagttataaaaagttcctttttcaatctcgctattactaaatggtaaataggtctttataacctcttcaaactcatcttttggaacttcatattctgctccaccataatttgcttcatatggaacttgctttccatatttcatataatacattttttcataaagatcataaaaatcaagttccgtataattctggttatcccaatttgtaatcaacagattattaagtgcataccccaacggcataacatattttcgattcaattcccggcatgttttatctaatggctgcactctgaatccaatttcacccggtgctccatcaaatcccggtgggtgatattcttccagaaacaagtatcctttttctgtatatttccactcatatgcttcatattcatcataataattagcctgtggactattatccttccatttaacctgacataatcgaacatttatctttccattcattgactctaaatgatattgtataatttccccttcatcaaatacaacaacaatatcaactgctgcctgttcttctttctccgctgctttgcaaaattcttctactttttcacgattgaccatatcaatctgattatcacaatctactgccgcatatcctttctcttccagacaattgataatttttcttttcgcctttaatgtatttaactccgacttctccttcatataaacagaccgaaaagtttgcgctgttttttttgcttctgcattcatttcagattctacggtttctttcttttcttctttttccgtaattcgattttgtccgcaccctgtaaaaacaataagaactatcaatatcatcgcaaatatcttacatatgtaataatttctcataaaaatttttttattcttcaaaatactcatccaatactgttgcatcttttttaacaacataaccacttccaccgattcctttcacattctcaaccatactgataagaagaattggtttgtccacgcttttatctgccgtaaacaccgaaaaccacccgatttctttgccagaagtatcttctttcgttgccttcaactcggctgtccctgtttttccagccagcaaaatatcgtcacgatgtgcagcatatccggttccttccggatcatttacaacaccttccaccccttgcataatttcttctacattttctttactaaacgcattttctatccatgtttcaccggatgcttcttctttgtatttcaaatacggttttatcatattcccttcatttaaaaatgaagtataaatacttgccagatgtaatggatttacaagaatctgcccttgcccataaccactatctgccaattgtatttctgtttctattttatctgtattggaatatgttgattcctgcatcgcaatctcaaacggcatattctgattaaatcctatttcatttaaagtattcataaaattctcactaccaattttaagagctgcctttgcaaaataaatattatcagaatagataattgcatttttcataataaccggttcatattcatgaagtgttgtcacttgataagatccccaagacgaatctttctgccatgccaaaccttcatttccaaaatcttcttttggatctatgctttccgttttcaacccaattcctgccacaactggtttaaatgttgagccaggacaccatacttgacgaaaacgattatataatggcttcttttcatcttcgtttaatgatgtccatttctctgatgataagccccgtataaattcattattatcataagatggggtacttaccaaagccaatacttctcccgtataaggattcattgcgacagaacaccccggatcttctttaaactgctcgtataatgatttttgcaaatcggaatctatcgttaatcttatatccataccatcttctttaaaaatacttgcaagaacctcttttacttccccatcactatccaaaatctttatatcacaaccatcttttccttttaattgcttttcgtataacttttccaccccagatcttccgattacactttcagctgaatatccttcccctggatgattttccaaatcttctgctgttacagactgtacataaccaattaaatgagctgctgcctcccctaactcataggttctaacttccacatctgatagcataacccctggaatttccaaaagtttattctgacaatcctgctcctcaagtatcttttcttctggctgtattttcattaaatctatttcttctactttcggaatagtttcaattggtacaaaagaatcttcttttacccactttgctgtgagtttgttatttattgtttctacatctatctctaataactccgctattttttcaatagatacattcctgtcttccagctttcccggtataattccaactgatgttgctactccttttcctgcaagcattttaccatctcggtctaatatttctcctctctccgcttttgatgtagtaacacttattttatcatcactctctaaatctggaaaaatcaggctatcctgccatactaatttatatccctgtttcgtcttcttcagttctgccatattgtcaaattgtattgttccggcaattgtattacatgatgtttcatacgaaagcgtaactgtatctgcttttttctctttcacagctatatgactgattttaatgtcactgacctctattccttcgtatatcttagaatttcgttgtatgtattcttcttttgtcagataaactttttcatctgaatctatcatagtatacattacttcatattcctttttttcaatatggttcatatattccataagtgtgtcttctggtaattccgttatcgtcctttttaataaaacacctcctgaaacagcaattactgttatagccattattaatccagaaatcctacaagtgtaagatttagtgctttgttttttccgtctttttttcatagatacccctttctttcaacgcttttattttcttaaatcttacacttgtaatatttgaaagtcaagtcttttcttaggtattatatatagcagatttaggatcagaaaatcctgccttttaatatgccggcactccatatccatatatgatgttactgctaccaatactataacttcgccttgccaccttatccccactgttgccttctattctttaaaataatcccggctcattctcaatcaaatcttctgccagatattttgcatccatattttctattccataactgtcatttgaaatttgttcagccaacttactggaataataaatgtcaaatgcttttcgtaaatcaatccctttcatttcggaaattacattgatgatatcattttccaaattttgcttataaacttcttccagttgcttcttatctaccattggtttccacctcatatgctcttttaaaagtgatcactcgattcagtgtttcctgatttacaatacagatttgattattcatcttatagtatcgcaattcatctaaaactttttccttatcccataatcctctaaaatacatatctacagtcttaaacacatcatcatccgcaacatttcctataataatgtcatattctttatttaacggctgtccttttctacatgcacatacaaaatcaagccatttctcattttctttttcaaaagataataccttaaaatcatcccattcttcagataattcataaacattaactattgcagccttttcctgtctcattccctttcggactgcccatttctttgcctgattttcgaaagttgtaatataaaatccccggccaaaatccagatactttttcgaatgtactacgtccggatattttataatttctgttgatccatgatatacaatcatacattaactcctttttctctcacataatcggtaatatcttctaccaaatattcctttccctgtgtatgaagaacatcgtaacatttaataatataattatccaaaattccggttgaatttaatattttatacactttggctggagacatcttccacttatccgcaaggctatacagcatgaatattgaaaaactcaattcttttttctcacacataatcactaccaacctttctgtcatatttatatttagattataacaagtattttatgttcatacactatatttttcaattattatcaaaaaagtaggcaatgaaaagcacaaaccctcttcatccaactgattttttcgtatactatccgcttcgcttcatctcgctatacgtgcgtcgcacgatgcatataaaaagaaatccccgatcacaagtaaacttgtgtcgaggatttctttttatatactccgtgcttgtgctagacgattacattccagcctgagctgcaacttctgctgcgaagtcatcaactttcttttcgattccttcaccagtctcgaaacgaacgaattttgtaactttaacgtttgcaccgttctcttttgctaccttatcaacgtattttcctactgtaaggtcgctgtcctgaacgtatacctgatcaagcagacagatctctttgagctctttgttcagacgtccgatgatcatcttctcgatgatgttttccggtttctccgggttctctttcttagcctgagcgagaaggatctctttctcgtgatcaaggtaatcctgagatacttcctcacgggatacatacttcggagacatagctgctacctgcatagctacgttcttcagtgctgctttgatctcgtcattaacaacatctgtatcagcaacaacaagaacaccgatacgtccgccaccgtggatgtaaggaacaaccacaccgttgtctgctgcaactttctcgaatcttctgatgttcaggttctctccgataactgcgatcttctctacgagagcgtcttttacagtctttgttgtatcagctgcccaagcctctgccatgaatgcatcaagatcagctgcttctgaatctactacctggttagcaactgcttctacgaatccctggaactcgtcgttctttgcaacgaagtctgtctcagagtttacttctacgattgcagcaactttgtcatctttaacaactgtcttaacaataccttctgcagcgattcttccagcttttttctcagctttagcctgtccattctttctaaggaactctacagctgcgtccatatctccgtttgtctcagcaagcgcttttttacagtccatcattccagcgcctgtcatttctcttaactcttttaccattcctgctgtgattgccatgataattttcctccattattcataatgtgtgtgtcactgtaagcagtaacatatgcttttctctatagaactatttctataaagtaaaatgcttcaacctgataatcaggctgaagcattttctttcatatcaagaactgatattactcttctacagcctcttcagcttcagctgcttctgcagcctcctcgtaatactcatcctcagctgcaccctggtttgcttcgataacagcgtctgccatcttagaaacgatcagttttacagctctgattgcatcatcattacccgggattacgtaatccagttcttctggatcacagtttgtatcacagataccgatcagcggaattccgagtgtgtgtgcttcctgtacacagattctttctttcttaggatctacgatgaagatagcgtctggcagtttcttcatatctttgattccgccaaggttcttctcaagctttgtccactcttttttcagttcgataacttctttcttcggaagtacgtcaaatgttccatcctctgccattctctcgatgtctttcagacgtttgatacggctctggattgtcttgaagtttgtaagcattcctccaagccatctctcgtttacataatacattccgcaacgctcagcctcagctttgattgcatcctgtgcctgtttctttgttcctacgaaaagaactgtaccgccttctgcagcgatgtcagaaacagccttatatgcatcgtcaaccattcctacagatttctgcaggtcgatgatgtagataccatttctctctgtgtagatgtatggagccatcttagggttccatcttcttgtctgatgtccaaaatgaacacctgcttccaataactgcttcattgaaataacgctcatgttattctcctccatttggtttttttcttccgtatgttttactctccttcgcaaccggacgaaacttctgtctcgacttaggcaccttggaaggaatccacatacgtgttttttagcaacgttcgtagtatagcataaaacaagggacgttgcaagaactttttcccacaacatccccatttttcaacatttcttatcctcctgcgcaacaacaggcagatctcctatctctagactaactgaaatgctcgcagcacatacagccatcctgtcaatgtgaatgcactgaacaatgttgtcagcatcactacacttgatgatagaactccttcatgtcccatattctttgccataacaaaactgcttactgttgttgcggatccaagcattacaaggattgcaatcagttcttcctgacggaatcccagttttacagcaatcggaagaaaaattgccacaaatacgatcaacttcataattgttgctgtcacagccggtttgatctttccaagtgctttcctaaaatcaaaggtagctcccattgccatcagccccattggtgtagacattcctccaatacttgtcaccgttttattaagaattgccggcattggaatcttgcaggctgaccagatcagaccagccacgattccaatgatgattggattggtcacgatcccctttaacgttttcatccatacagctttatcaattgcctttcgttccggatggaaaaaggacaacacgataaccgccatcacattataaagtggtacacttcctatgatcataagtggcgccatccctgcatttccataaatattctggataaatgcaatcccaagaagtgctgcgctgctccggtacgaagcctgaataaattcaccctggatggaacggtctttccagatgcaagataccagcgcagcaattgtaatgcagataaatgttactacaaagcagaaaatcacaaacctgatattccacacttctttaaaatcaacttttgccagatcaccaaacaacaataccggcaatggaatcagaaagacaaatttattcatctttgctgcaaactcttcatccatccagccaagctttttgaacagcattcccagtaccatcatcaaaaagattggtacggttgcattcagactaaaaactaaattttccattcttctcacccgtgccctactctgtacgaagtgctgtcacaggatcactctttgctgctttcttggatgggatcaatccaccaagtaatgtaaggacaacacttaataaaatcagtatgattgccggaacaatcggcagaactgcatttaccttcgcattatctgccacattgtgaataatcgcattcccaggaatcagaagtaacaatgttagtccgattccgatcactcctgcacaaagtccgataataaacgtttctgcattaaacacctgtgatacatttcgctttgacgcaccgattgctcttaatattccaatttcctttttccgctcaagcacactgatgtaggtaataacaccaatcataatggaagataccacaagagaaatcgctacaaatgcaatcaacacataactgatcgtatctacgattgttgtgacagaggacattaaagttccaaccacatcggtataagtaatgacctgctcatccttcccttctgcctccatcctgctattataatcgtccagaacctttactacttgttcctttccttcaaaatcctttggataaatgttaatagcagacgggactgcaaaatctacatatcccagtttctgcagattactatcataagaagccaagcctttcccactcattgacatcataagctccgccaaatcatcttccgtcatattcatctgaaatgcgtctgcaaatgctgtcggatcaatctgcattgcatttccgagggtgttctgaagctgcgttcctacgttggtcatcatctgtttcattgcagattcaagccctgttgtcatctgaccgataatctgtgtcattgcagaggagatctgtgtctcaagtgcctgaccaatggagtctcccagaatccccattgcctggttcatataatttccgatgatttttgacacctggctctccaactgatccatatcgatcattgctgacagaccttcctgaaactgcttctttccatcatctgtttgcagataagccatgaaatgttctcccatcttagacggatccggaagaccattctcagaagcatatgtcaaataacctttcacaagatcatctgataatttctcaagctgttccggtgttatctcaatctccggatcttccggcataacttctgccatccaatctgaaattattttctttgcttcatctgtctgaagatattccatcaaatattcatcgaattgatccggatctgtgtatcctttttccgtaatatactgttcgtatccggccataatatttttaatcaattcctgtattttctcagttgtaatcgtcacagttccgcttgattttatgatatcttttatattatcagaaataatcttttttgctgcatctgtcttaagaaatgctgtaaaatcctctccaagacctgaataatctgcctctggatgtgtctttgcatacttctgatatcccgtcagcagtccacaagccatctgtttcataccatccggtgataccttcagatccagattcgaaacgatctctcccagattcatctgcggcattccggaaagatctaagttcagagaatctagattcacaagtcccgacagatccagcgtattacttcctgtctgaaatgctcttgacagatccatagactcactgagatttaacgaattcccgaaatccagagaatttcctaaattgttcatcgcacttgcgtcaaatccaaatgctttctgcagtgctgcttcgtcaaccgtaaataaagaatccatggcgaatccattttcactgtctttctctccgaattttttatttgtaaatacattaacatccggatttgtcagctgttgtttcacaatctcactttttgctgcctgttctgccacatgtttcgtcaatgatgtcggatatgcaattcccggactcagagaggaggctttcgcatcttcagcgggtttcacaattccaaccacggtaagatcttccccattcgctacaagtgatttcatataatctttattatccgtcttatctttccagacctgatactgactgtcatactcataataatccgaactgttcacaagcttgaactttgttccgataatatcatcataagaataggttcccagatcatccggtgtagtaacattttcctctttcataaaggactggatcatctcatcaagctccagcggatcacgaagtcccaatgtataaagcataaaatcactcattccgccattcgaagtcagaaccacaacacattcattatatttctctggccaatgccccttttccacttcatactgattttcatagagtttactactctccggcatctcataaaaaacatctgtactcatcatagatgacatcatactgttcgtacttatagaagaacccaatcccatagcagaaaaggattgatctggattcacctgacgaatactgtctttattctctttataaatctgcggagaaacgctatacttatattctatagcattcgtatattgttccactccactcttgccagtatcaagatacttcttcaaagcaccaaggtcatttgaatccattgtggaaaacatattcgtcaccatctgaattactttaacctgatcctttgactttttctttgtatctgacttctctttgtctgtttttttatcatccgcagaagcactgtccatcccgaccatcatggatgtcagatcaaagcctgtactttgtatctgcagaggatattctgaaagcgtctcttcctctacgttctgaatatattgattcacacctgtagatagagacagaattaatgcaattccgataattccgattgaacctgcaaatgaagtcagaagcgttcgtgccttctttgtcttcagattgttaaagctcaaagctaatgctgtcagaaatgacatcgaggatttccccatattcctgtgttctgccactcccatcaccgtttcatctacttcaaacggatctgtatctgaacggatcacaccatcttttaatgtaacgattcttgtcgcatactgctctgcaagctctggattatgtgtaaccataacaaccaggcggtctttcgctacttcctgaagaagatccatgacctgcacacttgtatcactgtccagtgcacctgtcggttcatctgcaagcaggatatccggatcgttcactaatgcccgggcaatcgcaacacgctgcatctgtcctccggacatctgacttggtcgcttatgaagctgcgcacccagaccaaccttttcaagcgcttctgtcgcacgtttccttctctcggacttgccaatcccagaaatcgtaagtgccagttcaacatttgccagaacagtctgatgcggaatcagattataactctggaaaacaaatcctatcgtatgattacgataagaatcccagtctctgtctttatatttcttcgttgatattccattgatgatcagatctccgctgtcatatcggtccaaaccaccaatgatattcagaagcgttgtctttcccgaaccactcggtcccagaatagcaacaaattcattatctctgagattcagactgacatcatccaatgctttctgtatcagattacctgttcgatattccttgcaaatatgttgtatctgaagcatgccttctctccttttccaatcactattcagccattattttactattctacaccctgcttgaatgaattgtcattcactttataaggatttttcttgatttctatacattttttccattaatgtggttagatagtatgtaatacacgaaagcattgaaggaatttatcatgaaaacatataaaagacctgttgtttccgttgatacaggccttgctgaaggagtatacgctgcaagtggtgcaactataaaaactgccagcagataaatttctactggcagaaaaaatttatattttttcaattgtcttcttcttaacataatcctttaattgcttctattgttcgggtatattctcgttctacttcttcaaacatctctgtagtgttttctttgatttctctgtctcgaagctcttctgttaatgctgagctgacctcgaataactttgtaaatccaagattcatgcacacgcctttcaatgtatgtgcacttcggaatgcgagttctgcatcctgattttcaagtccttcttttaatccctggaaacttgtatcatccaaaaacttcaatacaaatttacggaccagtgtttcacttccaagccttctcatcacatcatcatagttgctttccattgcctcatagcattcttctaaattcatttttgtttactccttaattttcttttatttcaatagtcccatcaattcttcaaaacagactccatctgtcaacggaatttccatttcaatagacttttgtatgcacttctttataaatgcggatgcctttcgaacagattttgtaaattccactccattgaccgcatctgctgcaataattgctgagaaaatatctcctgtgccacatctggaatgtcctactttatgtgtgcggatcatctcgtaccctttacctttttcgaaacacaagttggatacatacgtcttctgtggaattcctgtaatcacaactttttccggtccggtctgcacaatctgttctgccatctttgccagctctctcgttgtccaccgttccttatacggcgttcctgtcaggatacatgcctctgtcacattgggaacaactacatccgcataacggaccaatcgaatcatctgtctgcacatttcttccgtataggtcgaatatgcctcaccgttatctcccatcaccgggtcgatcacagccactgtattctcgtctctaaaatactggataaactcactgacgatccgaatctgttctgctgaccccaaaaaaccgctacaaattccttcaaacttcagatccagattcttccattgttcaatatatgcttccatatttgatgtataatctgtaaaataataatcctcatatgcagtatgatttgaaaaaatcgaggtaggcactgcacaacactgaactttcagcattgaaataatcggcatctgtaccgcaattgagcatctgccaaaacctgtaaagtcattgatcagcgcaatttttttctgttgattatgattctgcatcattctattccctcgtttcttctatatataaatagacacacactaatttaatttaattacaatatgtcatagatgtcaatatttcttttttactattctcttccaacttctgtgtgattgctttttctactataataatttcttattaaataatatctgatttgtttatgatacctcaaaaacattctatttttttcacttttcactcaacgtattaaacaatccaagtttttattttcctgctatttttatgcaaaaaacacaattatccacaattttctttcttcaaagatttttcacacctctccggacacgttttccccccgcttgacagtttcccctaaaaagtgtacggttacgttgtaaattctaagaaaattctatgaggtgaaaaaatgcaggaattaaaaccaatcaaagaaggtaaagttcgtgaaatttatgataatggagacagcttaatcatggttgctacagaccgcatcagctgctttgacgtgattctcaacaatgaagttacaaagaaaggaactgtcctgactcagatgtccaaattctggtttgatctgacagaagacattcttcctaaccacatgctctctgttgatgtgaaagatatgccggagttcttccagcaggagaaatatgatggaaaatctatgatgtgtaagaaactcgaaatgcttccaatcgagtgtatcgttcgtggttatatcactggaagtggctgggaaagctataaagaaaacggaactgtttgtggaatcacacttccggaaggattaaaggaatctgacaaacttcctgaaccaatctatacaccttccacaaaggctgaaatcggagatcacgatgagaacatttcattcgagcagagcgttgatcaccttgaaaaatattatcctggaagaggacgtgaactcgctgagaaacttcgcgacaacacaattgctctctataagaaatgtgccgaatatgctctgagcaaaggtatcattattgcagatacaaaatttgagttcggacttgatgaaaatggaaatatggtaattggagatgagatgctcactcctgacagttcccgtttctggcctgctgacggttatgaagccggacatggacagccatcttttgacaaacagtttgcccgtgactggctgaaagcaaatccagacaacgactggacacttccacaggaaattgtagataagacgattgagaaataccttcaggcatataagatgctgacaggaaaagatctggataaataagatttcataaaacaaatagggacgaaatgaaccgcttaacaagcttttcatttcgtcctttttttactacatttctgtaaaaagaaaacgaggatcaactcctcgctttctctctggtttttagtttgttgttttcaccctatctgtgtgatcttttgtgattgctttgattgcaagcagaactccaatctgcagagcaattccgatcacgagacagatgactgcattctgcaagatacctgcgatcacatatgtaatacaggaaactgctgctacagtcattgcatatggaagctgcgtggatacatgatttacatgattacactgcgctcctgcggatgccatgattgttgtatctgaaataggtgaacaatgatctccgcaaactgctccggccatacaagctgagatcgagatgatcatcattgtctcgttcgtaccttggaatactgcaactacgattggaatcagaattccgaacgttccccaggaagtacctgttgcaaatgcaagaaagcatcctacaaggaagatgattgccggaagaaggttcatcagtccgcctgctgctgaattcattacagaagccacgaacggagctgctccaaggctgtccgtcatcgctttcagtgtccatgcaaatgtaagaatcaggatagccggaaccattgccttaaatccttccggaatacaagccatagaatccgaaaaacgaagaacttttcttactgcataaaaaacgattgtaattaccattgcgaagaaacttccaagcatcagtccaacagatgcatcacttccggaaaaagcctctacaaagcctgttcctgagaagaaaccaccggagtagatcattcctattacacagcatacaataagtgacaagattgggaacacaagatcaattaccttccccttattgtaaatagcattttctgttgcattttcaaatggtctgtctcctgttgtaaaaagatctccttcaatcgcatttttctcatgcgccttcatcgggccataatcttcttttgcaagaaccagtgttaccatcattataattgtaagaattgcataatagttatatgggattgcacgaataaaaattgaaaatccatcctcccctttcacaaatcctgttactgctgctgcccaggaagaaatcggtgcaataatgcagattggcgctgctgtagcatcgatcagatatgcgagtttcgcacgggatacattgtgactgtctgttaccggacgcataacgctcccaactgtaaggcagttaaaataatcatcaataaaaatcagcactccaagtgcgattgttgcaagctgtgcacccgctcttgtcttgatatgctctttcgcccagcgtccgaatgctgcagaaccaccggctttattcatcatacataccataacaccaagaattaccagaaatactagaatacccatattgtaagaatctgtaagtactcccactactccatcctgaaatacatgtaaaattgtagcttccggtttaaatcctgaccaaaatgcacctccgatcaaaattccaacgaataaggagctgtaaacttcctttgtaataagtgccagtacgattgcaacgaccggtggcaccagagaccagattgttgcatagagctgaggtacatactcggcagatgtatctgcggcaaatactgttgttgaactacagcacagaatgagcagagacatcagaaacacataccccatttttcttttgtttctcatttccttttttcctttcctgtaaacttatgtttgttaagtttgtgtgtaagcatagtgggttttgcctgggattctctaaacgcaaaaaatgccataggcactctctgctggtgagtcacccatggcataataattctagcgtcatcgatagctctccacacctgtgacagtccggcgtatcttctacatccggcccaggaatcatatctgggaatatcattccttcggcggcttctcctttctctcactgacagtcttcccaagactctcgtcagcgggtactcatatcaccgcgcctctatcaaacgtcactatattatcacattctatttaaaaaagctagacttattttataatagttttcatttcacagctttttcatatgtaaatgtctgtaaaaatctctgaaggcgatctgtttcaggtttttcaaaaagtttctttggatctccttcttctacaatctttccaccttccaggaaagtaacgcgatccgctactgcttttgcaaactgcatctcatgtgtaacgatgaccatagttcttccttctttcgccagatctagaacaacgtcaagtacttctctaaccatctctgggtccaatgctgccgtaatctcatctaaaagtaatacttccggatgcatgatcagggcacgtacgattgccactctttgtttctgtccaccagaaagctgtctcggataatcatcttttttagagcgcagccccacacgttccagcaattcaagagcttctttttctacttctctgcgatttctcttttttacttttattggagcaagcgtcacattctgcaaaatagtcaaatgtgggaacaaatcataactctggaataccattccgattttttctcggtttttactcagatttttcttatttgggtttacaacctgatcgtccagcagaacttctccttcctggatttcttctaatccattcaggcagcgaagcagcgtactttttccacatccagaaggaccgataattacaaccacttctccttttttcacagaaatatttatgtttttcaacacttttgtatctccatagcatttacttagatttttgatgtgtaatatttcatccatatcagttctcccatcgtttttcaagatattttgaaaggcagctgatcggccagcaagcaataaaatacaggagaaaaaccgttgcaaatattgcaaatgctgcatttggagcagtcttacggtttgcttctataatctgctgtcctactttgagcacctccacgattccaatcatcataacaagacttgttgtcttgatcattctagtgatcaagttgattgaaagcggaatcatccgtcgaataatctgtggaatgatcacatattgataagtctgtctctggtccagccccagcgcttcgctactctcatactgaatcttcggaacgctaagcagagatcctctgactaaatctgccatctctgcggttccccagaatacaaatacaatgattgatgcggtttctgcgtccatattgattcccattgccttggtagctccaaaatatacaatgaataacaataccagctgtggcatgatacgcacgatctccagataaactctggtaactgcctgaatgatcctgttttttgatgtcatgatcattcctagtaaaattccgaatgccatactgagaacaactgatatcaggctgattcgaagtgctacccagactccctgcaaaagccggatcatattatttccttttaataaaatctcaaatcccatcttatcaatctccaaacatacgatatcttgctttgtgctcaaccagggttccaagaacagaaaccggtaacagcataatgatataaaatcctacaagcataaccagacactctgttgtattataatattgtccgatcagatcctttgcagtaaacatcagatccatcaggctgattgctgaaaacacactggtttcttttaataagaagatgatatttgcaacaatcgccggtacactgatagaaaatgcctgtggaagaatcaccgaccgaaacatctgcaaacggttcatccccaatgccagtgctgattccatttgcagcaccggcactgcctcaagcccgcttcgaaaactctctgccatgtagcttccacctaaaagccctaatcccacagctccgcatacttccgcggatatagacaatccaacctttggaagtccaaaatagataaagaatagctggactaaaagtggtgtgtttcgaaagatttccacatacactttaaccgcctgtgctaaaaccggaattttaaaatgcaaaataaatgctgcaacaattcctatcaacagtgataaaacaattcctatccatcctattttaactgtcaggaaaaatgccttgacatacattggcatatactcaactattacatcaaaatccatgttattttgttgcaccgccttcgatcactaatgtatcttcgtaatctgcaccataagtatcaagcagtgttgcctcataatctgcatggaagaagttttcttctccaaggctctcaatttcagcattgatccagtcaagtaatgtgctgttaccttttgttacagccggtgcaatactctgctgatctccaagagatgaaattccgactacatatcccggattctctttcgcataagcaataacctctgtgttatcgttcgcccatgcaacacctgttccattctcaaatgctgtctttgctgctgcataagtatcaaatttctgaagtttaatgtccggttcattctgttccaaataagtctctgctgtagttcctgaaattacaattacctggtcatctgctccaatctgatccagacttgtgatcacacgatcctcatgagatactacaccgagtgctacattcatatatggaagtgcaaagtctactttttcagcacgttcgtctgtaacagtgaaattagcaagaacgacatccaccttccctgtctctaaatactcaacacgatttgccgcttctgtagacacgtaattgatcttcacaccaagatcttttccaagacgttctgcaaaatacacatcataaccctgataatccccattatcatctacataaccaaatggatttttatcagagaaaactccaatattaatctcaccactttctttgatttcatctaatgttcgataagcctgatttcctttatcggatgtcttttcggctccgcatcctgttaaagcaactactcctaatgatgtagctaaaactcctgttactaactttttgaataaattctttttcatcttctcgattctcctttcagttcatgaattggattatattcctataaacctactatgtcaataggtattatatttttttagaaaaaaagactcttttcagaatattaccgaaaaagagcctttattcccattatatttctacatttttattaaacttctattaatttatggtaggacaaatagttttttgtaaatgtcaacaccggcaatcaataaaagtgttcttcatctcataacaacttgtaattgtcttatgctgatcccagaaaaacatatctgcccctccttttaacgttctatttagaacgactatataaggttgaatcctttttgtcaagcctgaccgataacagacaaaacaatccaaaaaaagattgcaaaagtgatagctgtcaataattttacatcaacagctatcactttcatttcttttttatatctactattttctaagattttagttgttagaatagaaggaacccatataacggatatattcatcatctgttttattcgcttgccaattatgaacattcgctttgttgtgctcacctgcaataacagaaagagattttccaagattgtcaaacgcttcctctacacaagcttccggtgtcatagctgctttcataacagcttctcctgccggtcctcccggaagattgcttaacagacttggagtgattgttgttcccaatgtaataacttcgacgtctacattggtgctctcacactctgctgccacagcctctgtcagtttcttaatataagacttgcctgctccatactgtgcgttatatggtgaactgctgattgctgtcaaagaagatacattgattacagctccacgatcctgctttgcaaagattcccatataatgatagaaacatttcaagaatgtcataacattaacattaatcatctgctcatgcttctcccatggagtgtcctgcagttttccaaatgtatggaaacaagcaacatagctcataaatcccatgtcaagatcttttgtcgcctcaaaaatcttgtctgtgcagtcagactgcgcaaaatcagcacggataaccatatgatctacaccatatgtttcactgatgttctttccaagttcctgaagtttctcttctcttcgacctaccaaaacaacactcattccctcggatgctatcttctctgcaaatgcctttccaacaccttctgttgctccaagaataataccccattcaccatacttttctcttaaagtcattactttttcctcctaatttgccgatttaaaaaccgaaatataatataacatatattattaaaaataacaatcagaaatagtatttttcaacattattcgttattattactagaaaagatgtcagccacctcactaataataataaacgctgttggatcaatgtcatgaacaatatctttcattcgaatcacctgatatctgttcaccacaaagtacaacattgctttatcgcgattggagtatccgcctttggcgctgacacgcgtaataccgcttccaaatgtttctgtcaatgctttgcaaatctcatgcggccactctgtcacgattaccgcacattttgccctgtcaataccttccactataaagtcaactgtcttcaatgcagcagaataagcaacgatagaatacaatggaagtacccagctctcaagcacacagccacaaatgacatataaaataatattatataccataacaaatgttcctaccgtaacacctgcacgttttgcaaaaataactgccattacttcgataccgtccatcgcaccgccatagcgaatcgcaagaccacttccaattccggagatcacacctccaaacagcgcacatagcagtaaatctgttcccgcaagcggcgaagcaatactgacatcaattggaaatatatttgttatcagccatgcaaacaaagaatagattccaactgtgtagattgcataaaatgtaaaaagtccaccctgcttctttaatccaacaagaaataatggaatattcagaatcagcaagaataatgacaatgataagcacgagggtgttatctgttcgagtaacatagatgttcctgagataccactgtcatacaattttaccggtgtcataaaaagtgtaatgccaaaagcgtttatcattccggcaaccgtaagcatcaaaagatttacaattcgaggtttctgggtctgtctcattttaagcgctcctttttcgttataattttgtcaatcagtttcgatttctaaatcataccatattagtagacatatttccagcccatataggtaacatgcatttgttccagtttctgcaatgccttcatatacgccatcagtcttttatactgatcatctccaagactatgaatctgcttcaatatcttaatatttgacctggtaacttcataatccatatctgcatctttatattccggatcaattcctttacccgtcaaaagctgttccggtgtaatatccaatacgtcacatatggataacagataatttgcttttggattcgtctttttctttttcagtcactgatgttgcttgttgcaatcccggttcttctcgacagttccagctgggtcatgttcttctgctccattatgtaaaagcttcttaaaatttattacaatcatcgccccgtctccttgcaagatctatatgaggaaaccacgagaaagcataggattcgtcctcctgaaggtatgagtgcccatgatatcaaactcatgagtgacaatgaccttttggatatggactattttcttcatgaatttgatgatgatgacgattttagtgaagaaggattttatcttttctaacaatcgtctatttcctatgcctcttttttatgaggcatttttttacttctgctttaaacacgaactttcctaatatatgaaaaaagcaccaaccatttctgattgatactttcaaattattttgtttttgtaaatctgtttaattgcgtattcacatctcgtccaccgtacataacacggataatcgtaaccacttgtgtatcatcatccggaatatatagaacaagataattgtctactggtgctacgcgtaaccctcgacttttccatggttccaattcatattgtcgatatctcttcggcatatgatcaagatccataatacatgcttcaagcctatcaagctgaccacttgcattttctggtgcctgcagttcaaaagcaatgtattcgaagattccacgaaggtctatctcggcctgatctgaaatcacgatatcataaatcataaattgtaatccttgcggatatcagcaaaaacagattttgctgatctagtatgaccagcctgcatatctgcatatcctttctctagttctgcattcatctgtgcttctgataatgcactaacgtctacaggacgagcggatggcattttcacttcgaaaggaagtcctccttgaagaataatttgtttgtaaaacatatttattgcattggatgcaggaattcctaatgctgctaagattccttctgcctgttcttttacatcaggctcaatgcgcacgtataaatttgctgattttgttgccatagtaaatactcctttcgaattttttctaactatattatatttattcgtccggacaaaagcaatacaaaatcaacattttacaaattgttcatactccggttaaacccaaaagtagatatatttccatataataaaaccgagctttccgcaaggcttctttgatgataccaaccttacaaaaagcccagaaataccagaccactaattccgatgatgatctcactgttttttatctgttttcttctccaatttttttattgaattcaggcaatctaaaagctgttcaccgctcattgtcagaatcctatctaaatgttctgcccagtgctgtagttttttccgtcggcggcagttattcgaaattttcgaataactaaatccttctgtagttcgctatcctcgaatattttcttaatatgataatttatagtgttagtgccgacatcgtacaatgtggccatcatcttctgtgtcagccatatattctcatcctcatagcgcatctcaatactgtcctgctgattgccgacagatgcaacataggtcaggtattctgctgcgctggaacggatggttatttcatcttttttctttttcaaataggatgcttccttcttcgataaatcactctataataaacaataaacgaattgctgtatactctcctcgtccatgacaacgcttatagttccctcagatgatacaaatattacaaatgacttctataccaatcaattaccgcatccctgtctgaatcaaagaactgtgttgatacatagatatccgttccattgaaattgatggcctttgctctatatctcttttggagagaattacccatattatctgttctactatttgcaattgctggataatctgtagcttggaaaaggttcttggtatattccttggtttttaaattttctaattcagcagaatcaatcaatcctttttccaccaaattttcaacaaaattataaaatagttttgctactggaattaaaccctctgcccaggtatcttcgttatcaatatcaaacggcacctctgataaagaaaagctaaaatcatcagtatctaactgcagtttcgctaacaaatcttttataaaagaaatgattccattagctgataagtttgcttcaaaatagataccgctattatctatctgctttggtttacgaatctttctttcatcattggaaatataaattcgagtcgcatacggaatagaataatcctttgttgcaagatccgttatggtttcagcatcaagatcaaatgccgtattcatcgtctttgccaataaatctgcccaactagaaactttcgtatgggtcagaacttttcctatatttcttgtcaacaggcaaagcaacttatattcaataggtgttaaatgcaactcttcttcattcaaataggcacaacctgcaacataatctacacgaagttttccgtttacaaaaacaaccgtttcggcaggagatacattttgcatcattgataaccttctttgcgtgactcttagtctggcaagcagttcctcaacagaaaatggctttgttaaataatcatctgcaccagcatccaacgcatcaattttatcggtatcttcactgcgagcactgattacgataatcggcatgtttgaccaagtacggatttttttaataatctcaacaccatccatatcaggaagtcctaaatcaagtaaaacaatgtcaggattgtgtgaagatgcttctaaaattgccgattgaccattgggtgctgtcagatatcggtattcgtgtgcttttaaggttgttgtaattaaatttctgacagatgtgtcatcttctacaactaatattagtgacttattcatatactttgacctcccctgccggtaatgtaaatgtgaatactgttccgtgcggcagattatctgaaacagtaagttctccgccgtgggcgttaataatggacttgcacaaagataatccgagtcccaaacttcggcgactgtctgcaatttgatttgcaccactgtagaacatgtcgaatatccgtggctttatttcatcagcaattccgtttccatcatccgatatagatacgatcgcttgttttccccgtttttctgtccgaataacaatatgagagtttttaggtgtatatttgatagcattatcaacaatattgatgattacctgaacaataagctttgcatccatttttgcaagaagaatttcttctttgctttcaacggaaatatgatgctcttcactctttcggttaatatgatgtaacgcttctgtaatcacgtcatccatcaaatcttccgttatacggagattcaaccgtccttcttcaatccgggttacagccagcaggttttctacaaggttaatcagccacatggaatcatcataaatatccgtgtatagctgcttttttgtatcattatcaaaggaatcaccattggacaaaaggttactggcattaccagaaatggatgtcagcggtgtcctcaaatcatgtgaaatagcacgcagcaagtttgctcgcaactgttcattttttgcaaggacagccgcctcctgtttctcacgggcatttttctcattttccaaagccagagcacattctccgagaatggacagtagaatactgttttcaaatggatcaagaggtatttcccccatcacgattccaacaactccatataccatactgctactgcgaacagcaaggtacaggcattttgcattggaaagcgttcctgttgtggatccggcacgtttattgtttttcaatacccagccggcaacggccttttcattttcggaaatacatgattccaaattttcctcagttacagaaaaaatatgcggcgtatccaacacttcgccatcagctaaataaaaaacgatatcttttcccaagagtttaatgagctgatttgaagttgtggataagtaagtttgttttgaaattaagattgtgtaaagatgagcagaagtctgaaatcttttgctcatcttttgagagtgctagttacaggataccgtccaacatcaaattgactttcagaacatttactgttttctcttcaaaaacacctaaaaatctactgtcggtgcatttttcaataatagctctgactttttttcactcatattatttgcttttgcaattcttgtcacctgatatttaacagccgtaggggagatatgcggatcaagtccgctgccggaacaggtcacaacgctcacatcactttttactatcttaccttccggtgctcctgcccaagtggttaatcccatgtgtggcttatctgcatctgcacgttcataaatcaactccgctgctgtatgtccgtgaactgcatagtgcatcttgttctgcacttttgcaaagaactgctttgttgtttttgctgtgcggtcgtaatcaagagctgtagcatagatgtccgttatcttctgatagaatctacgctcagataaacggatctcacgaatctgctcaagcaaacgatcaaaatattctgttgtaagcactgatccaccattttttagacgttcgtcatccataacccagcctttgatggtgtagtcttttacgatgccatttgcccacttacgaaattgcactgctcgctcattgtttaccttgaatccaacagcaataatcatttgaagattataatgtttcgtatcacgagtgacctgacgtgaaccttcagtttgaactatccggaaattccggatagttgcgtcttcctcaagctctgagtcagaataaaccttcttaatatgctcattgattgtacgaacatctacatcatatagtgtggccatcatcttctgtgtcagccatatattctcatcctcatagcgcatctcaatactgtcctgctgatcgccgacagatgcaacataagtcaagtattctgctgcgctggaacggatggttatttcatcttttttctttttcaaataagaggcctcctttataaatcgaaatgcgtttttgctattgtatttagctgtcctgctatttcatcaaatgataaattcaaatccagagtcctgacagtaatctggtttccactcatctgatacacattattcggatatatcgcttcatcagtcttggcatacaaaagcattcccgaaaccgtgtggtccttctctctcagttcatattctttgtttttcacataagtaaaaatctgataaagattgcctgaatgaagtgtatgcttgtcaaactgcacctgtgtgctgtgctcatagtactttgcgtcgataataagaaccttctcaccacttttgagcataatgtcactttgcatcacaggcaacaaagagttttcttcattgtccagctgccaaggaatctgtgatgtatttgcggtaatctgatttttaaactctctcctataatattccaggataaacttctcatacaatcgacacattcgctgctcgtctagaaagtccatcaacttggtatgcccattcgattgtgtttgcaatagaccctttactaccaggtagcatatcgaaattagcatacgataagtctggttatttcgattgtactgaacattccaatttaccgtatacaaatcaataaaatccacctcgctgaaatacaccattaactttctaagatttttcttgcgctgtttcgatatattcgaacgaaggagaagttcaactgtagatttgatgatccgattcatgatgctgttaactgaaaactcatcgtatgtacagattagctgtttccgtaacattgactgtgtcttgatggactctgcaatatcaatctttcctcgcagagaagagagtgcctccgtctgcggaatatattctttaccaagtcctcgctttatctgaatcgcgatacctttttctaagatagccgccatcagctcgccagtattattaaattgttctgtggctatattcttataaccttgctcattcaatacctgaaatgcataggacagcatataatagatgttttgaatcggtatcacttaatcgtactccttagattttcgctccaatctttcaccttcataggttcatcaaaccagtattctttcaataaaggtatcagctcatattccacaacaccataaagccaactatcgtcaattgtatcaggctgtaaattacagaagtagctgtgaccaatacagaacccttcgcccagagattcatcgacggaaatctctctattcaaactctcgacgcaactgatcagtttgttgaacttctcattatctaatgccatgcggtactcacggaaccccggagtctcaaaacccggcttgatatcaaagaaagcaaaccttctacgaagtgcataatccagcatagccaggcttctgtctgcagtattcatcatgccaataacatagacattcttcggcactgcaaacttttcatccgaatacagaagctgtagcgcatttcctcgcttatcattttcaatcagcataaacagctcgccaaagatcttactcagattgccgcgattgatttcatctatgataaagaaatactcattatcactatctacctcggccttcttgcagaaattgtagaatgcccccttcttcagttcaaatcctgtagcagatggacgaaagcccataataaaatcttcataggaataactctgatggaactgtaccatcatgacacgctctacatcttttacccccatcatagaataggccaagcgcttagcggcatatgtttttcctactcctggtgcaccctgcaagataatatttttcttatttctaagcaagccaactaatctggtataattatcttcagacatgtacacatcatccaggaaattttctgctgtgtactccggataggcaatttccttctcatcatctgcaatatcgtcttcctcaaacaaagccttaatttcttgtacgaagtcactatatggcgtgatatcggtcagggtcttctgaggggactgatgattaattgtccaatcgcccttgttcgtccaatttacttttctaacattggaatattcatctgtgcgatctgcatcatattcataatcagactcaacaattcctttgccaagaattccattattgccttttttaacatataccacgtcgccaatcttaatatcatgtacaaactgccaagtagcatgagctgaattcttataggaactgctatcaccgtattctttcttcatctgctgtttcatttcatccttagagctgaatactccaagatctccaatctcgccccagcccagaagcatataaccgttcttataacactcttcccatttatcagcgttttgtcctggagcataaatccagtaatgaactgtatcgacatcactatctgaaagagcatcgctatcattcgttttcttactctttgcatcagagacaccttttttgaaaatatccgatgccatctccgctgttaattccactgacttgcctgcttcagtaagtgtccacacacctcttacgcttttatcaatgtatcccgctccaacgagatagtttctggcgaaagcaacttcattttcaaatttgttaaccttcgttttccctctggtttcgcttactatctcatccgacaaatgctcgttttctataattttctttctcgcttctaccggtgtcgcagatcctcctaaatcgcgtaacgcctgtagcaatggcataaaccacttaagaaattctgctttcgaagtctttttacctttttcagcagccttttcctgattgacttgctcagagatcacccaggccgtataggataaatcaggaaagttcttgtatttatattcacctgcatccagagctttcttacacaaatcctttatttcaagataatctgcagcatacggcactttcttaagcttcttctcggctgcgacaacaaactcgccagacatattctggacatctgctataaaccagcggtttctggaatccaagttgataaatgtataaggacgaatccaataaaggcccatcgtaatattccagcgaatgcaaagctgatcatgtaccttgtcataagcctcggagaatttctgacggttatcctctgtgtcattgtcagccaatgcaagagctacctcaaacaaactccacaagttatcaatatcatttgcttttctatcatccttaaatccataaaacgttgcctttagattattaagaaccggaattccatcaaaattgctcggcacagttgcagcaattccaaactctgacgctatcccgttaagaatagcaattctattagcatttgttattcccttgttgaatgtgccaaagatggtgaacggatcaatatcaataatctcatcaccactttcaagtttcggaacactaattccaacagtgtcatacaccgcatacattttctgaataagagtctttctatcagttttgaaaggaagaagcttagtagcaaactccgtgtaaaaatctatccaatcgtattgcatttaataaagtacctccttatgcattatcccaattttgaactaccaagtggctcaaatccacaagattccaacatctcattaatctcatatatgctattctcggcacatgagcttaatacgcatctataagcattattttgtggattagttggctttatattgaaatcggttttcccaactaacatttctgcttcaggcactgaaagctgcaatccgtaacacaatcccaaaaccgtttgaattgttgtgggatattcttcttcatttcttaatctctgtattgtacattcgcccaccaatgaggcgtctgctaatttcttattagaaagctttttctctttcataagctgtaccaatgtttcagagaaggctcctggatacaatctcattgcatcagcacttcgacttgctctctgaatttgagataacaatgttctgttgtgagcattcatctcaaatgagtattctagcaccatattatcaagcggaacatttccctcaccctcaccaaactcaacttttacgttgatatgtccgtctggctttttgtgggaaagcagtacaaccgtctccacatgagatttttaggctatttcaaactgacttgataagttgatttttcagcattttcttgaatttccatattcatcttgattaggctattttataatagcaacttgctttcttccatatacatgtgtgataaaagaattatatatacctgacgatttccattcgcctgcaacaactataatcttatctctgttattatatatctcagaacgaatagttttatatgtgatttcatcaaaaaatgataatataaaagaatatttgtggctatacataggagcgactaaatagatttctttcttttcgttatcatataactttcctttaacagctgcctcaattatcttcttgccaaaacagcccctaggatatctatattcacttctatcatccaataacatttctcctatttctttatcaccatatttcaaatttactggcatactcttacacatagaataaatttgctttaatgtccttagtggatgtgctttcggctctccaatgctatgtccatcaattttcttttcttctttaggatttccagttacagatagaagaccatcaattgcattattaaaaataaattctgactcatcaaatttatttttatcgaattccgaactgctagttccaaatggacaattcaagatatgtttatacattggttttgtagctctaaaataagcacttttacttccttctatagcacaaatgtaaagtttagcttcgcatttcggattggggcaataaaaagtctcatttctatcctcttttatagcttgacttgaatatagtactatttttctttctatatctctatatgcataatttgacatcttcaaacctcctattttatgttaaaatacggtttttattcttcgaactatacttcgtagtatttctgtgtattccattctcatcagcaactatattgctgcgtttcagcttttcttcctgaacagcatcgaacatttcttttgaaatgattgctggatgagaattgttcaatttataaatctgaccttctttgccgcctacattaacaaccgaaacacctatgtacttttcattactcagcatttcttctatagaacgttttggccagttatcttttcctgtaggagatttgatactcctttctttcagttccttaacaatgcctaatacgcttttaccaccaagatacaaatcgaaaatcagcttaacaacttctgcctgttctttattgattacaagatcaccattcttgtccttatcatagccatagcatcttctacgatagaaccccaagctgccgttactagctctttgtttaatgccccactttatattagcacttcgtgtttcattttcagcctgtgtgcaagcttcaacggtggatatcaataatgaacttcccgctgttaatgtatccagttcctcttgtttgaaaataattcgcacttgtgactctcttaaagtatttattgcatccagcacctcgacagtatctcttccaagtctactgatgctttttaccacaactatatccgtaagtcccgctttacactcttctatcatttgatgaaaggcaggacgagaagaatcttttttagcagatgcaatatctatatgaatatcgaccagtttccagttgttatgcccagatataaattttgtcagccctgaaacttgtgccttaagactctcaagctgatccatagtgttagaactcacacgagcatagatgacaacatgtttcatcggctcatttgtattagccggaattactctcactttgccaggcataaacacctctcccttccgaaatagcctaactataattcgatattttccaaatgattattagtctatttctactctcacttttccataaatcacaagtaaacacttctgtataatcgacccaatctcaatgctcttatctatccaactataaaaataccaagatattattcactttttaaggcatatttcgcagtctgattttcaattctaaaaatctcggaaatccccttatttcaagccattttcacacttttacttctgtactttagtcaacagaactacgctctcaacggtactttcgttgtcccaacaaagttcctgtgtctccctgtctccaaaatacaccggaaaacggaactttatgtgcttcaggaatctgccatctggctgctcctgctcataaatgtccacctgttccacaaagctgttaagaaattctttcttctccaggtcggtgaacttatcatatagtttatcaaaatataaaagaaattgatagacgttttcttctgatattttctgttgccggatattcagcaggcgattcttaacttcttctatactgttctccacgccttcaatttcatcatacagatggtataaccttgtctccatatcctgatatttcttctcataaaatttatccatgatatccaggctatccatctgctgtccaagtcttccttttgctccggtcagctgcctgtgctgtttttccagtctttcaatctctttttctatttcttctgtatctattcttgaaccgattttattcagaattgcttcttcaaatttaggattcttcaccagcttccgaataacttcttccactgcattgttaatcttctcctcactccattgtttacgatatccacatttatgaccatctaccaggcgacgatgtttgcaggcataatagaaataatccttatataaagttccgtctttctttttctttcggttcacgtttccatacataccacttccacataatgggcatctcaatattccggataaaatatgctcatgatcgagactatgtgtcttttcatatttcacacctgttttttcccgtttttgatgtgccagctcccagtctgtttctgaaacaatcccttcatggataccatcgtgcagcatataattttcctgctttacaatgcggtattcatttcttgtaccagaaactttctcgtttttccttcgtccataagccagctttccacagtataccggattatccagaacgccctttataaatgaagcggcaaatgcgtccagtgtattattctgtcgttttttctttttgtatccatgctggttcagccatgcagcaatcgcagagattcccatattggtatgaataaatttgtcatagatcagacgaataatctctgcttcgtcctctgcaatctgcaattctccatttactaattcataaccatacggagcaaatccaccattccattttccttccctggctttctgcttacgtccttccattgtctgaacaaggatattctctcgttcgatctctgccaccgcagacagaacagaaatcatcagctttccactatcttttgagctgtcaattccatcttctacacagatcagattcacttcaaaatcctgcatcctctgcaaagaatttaaaacatctgccgcattacgaccaaatctggaaagcttgaacaccagtacaaactgcacctcatctgttccattctcaatattatccaacattctctgaaattccggtctgccctctacgctttttccatacttaccttcatcggaatactcatttacgatttccatgttctgaaattccgcatatctcttgagtttttctttctgagcatccagactgtagccatctacctgcatggttgtggatactctggtatatatatcgcatctaatctttttattcacttttcctcctctcctcagaacatcccaaagcaatttccaacaattccgttgcaacttgtggatttctgatacgcattaagttatcccagacatctgctttccctagaagattcatcccaccatgccatactatttcatcatcaataacggcaaagcattcttctacttctgttcttgttatcacatttattcctatcaattgcattgttctgattaattcataacatacatccgactttccgtaagtaatattttccggatctgttgtaataactgtgacctttacccctacttcctgtctcttcttgattagtaataaaaatctgtcaattttatcctgtctgatatccggactggaaatcaccaccattttttctgactctacaatatcttgctcaaatttttcggtataatttacagaatcaaatattgcatttattatttgtttagattgcaactcttgcgtccagattgaaaatcccatcttcctgtatgttctcaatctttttgcatacattttatcaaaataacgcacatgcgaatcgatataatcatacacataaacggcttcttttccgacataatctctgtttaatctacctacatactgttccaggcgtccttcaaaagatacaggtgcagcaagcattaatacatccagtcttggaaaatcaaacccttctcctattttctgaccagttgccaccaaaataagcgattcattttcaggtatctgctttaattttactcttatttcagtattctccttatccgaattatccccatatagaaggaatacatgatctgctttttcctttaaggcatcatgtaataattttgcatgttccttaaatcttgtcaaaattacaggcgtttgttttcttgcgacacaagttataacatcatctataatcatttcattgcgcaccttactggtactaatcaaattatatgctttattaatattatccttgctttctacagtatcaactactcttgtgtatcttggtacaaaataatgtccaattccctgttccttagccctctccaatgcagtaaatctatgtctcaaaggtcccaacagcatatagataatccgatcaaggctgtcaccacgtttaggtgtagcagaaacaccatacacatattttgcgtttattttttgtaataattccatagatgtgttagaagctgcgtgatgacattcatccataattaccattccgtaagaattaattcgttcattaaatttccctctgctgtacattgaaccaaccattgcaacatctataatccctgttaatgtatttttacttccgtgcaaaactcctatgacgctatcccgttttttctttcttcctgtctttgtttcatattccggtggttcttctcttatctctaagaaatgattcaattcatcaacccactgattaagcaaatctttactttgcagcaaaatgagcgtatttacttttcgctctgcaataaggtaactacatactacagtctttccaaatgcagttgccgcactcaaaaccccatctgaatgtgataataatttttctgctgctaattcctgttgcattcgcaaatcacctttaaaagatactctgataggttgtcctgtttctctttgatctgaaacatcaactgaaatgcctgctttttcacattcctgtataatattttcccgcagtcctctcggaatctgtatatatccatctatatccttacctaaatatacagcactgaaattataataattagaatatcccagccttttatttttgtaaaattccggattatcaaatgccgccaaactacggacctgattttgtattcttggcataagattcagagtatcaatataaactccattgcccaataccatatgaagcttgcccacaacatctgacttacaaaactcacatttcttcttccatggtttcggtctgacattcttctcaatattagtaagcgttcctctgacttctgctaattctccctgccattttgccatgcattgttcaacatcttctattcctagcttttttgttttattgaaaagagcatcccattgatcaggatatgcattccaattttcatctacaaaagcactatttccatttttaagtgcctgcccctgtaatggcaatgcaatcaaattacctatgctgcttgccacatcctgcgaaggatacattctatcataataatgaaaagatttcagattgatggaagttgaacccttgtctaacaggagaaatccaaaattccttgctgttgccgcaggtattgcctttttaaagaaaatccatacatgggcaccttttccagatcgagatctctcaactaaaggtctgataccattaagctcacacatttttctaagcgcatccacttctttatgccactcattatccgtatttgcaaagtccgtaacctctgctcctttttcgtgattatcaaaatcaaatacaataaatctgcatgttccatttggcagtaaaggatatacacctattacatctgatccatcttcttttgtgcctaacaaatgagcaattattttttttacatccagacttatccatttggtattttcacattcatcacaaaataccttctctttacgttgtttaggacaaagccggtcattccaacgatttgcacattgtggaaaataacccccgttctttccccgtctggcatatacatcttctcttccccaaaacatcgaaaagaaacgtattgccattttctctgtaatatatggcggatttacaatacgactcccttgatccaggtcatattcttctgcactttctattttttcttcaaaaggattcacctcttcatatgaaatgcctgctttcttcaatttatcttttaatatcttgttctcatattcaagcaacctaaccatttttctcaacgaatcagcatcatatgcttctatgttcaaaccttccacctacaattcttattatctcgtaacataacttccattcaatgtcccaacttaattttagtacttgttccaactattttcaatacttattttccgtattgacgcatttcttcgccaatcgtataattaagttagatacagagcatttctgttatcaaaatattgcccgcccaccattggcgacttataaatgattggctcgaaaatattgttcgcttaccggaagcgtctaataaatgtccggcttgaaaattatttagaaattatttttgttttcgatattgtgtttttatcacacattgcatatactataaatacacaaaaaagccaaaaaagaggaggtgttagtatggctacttcaagtattactcataattttgtcgtatccaatccaaatagcataaagcgttttgtcgcagcaattgacgaagccgaccgtgaccgcacaccaaagcagacacttcccggacgtcagttaacgaacccacaggaaatcttagctttaatgtcaaaaaggaagaaaaaacatgtctgataaatattttaccgttaatattcgggcatatttggataaagacgaaccgacatatatcggagaggaaagtctttacgacttactctccgatttttcttgtcccaaaaatcccgatgtggaatactttttattacataatgcgattgagtttaccaaaaaagatcaatctatcacttatctggtatttgatgctgaagatgcttcactggttggttatttttcacttacagtaaaaccaatttctgtccgtgcttcaaatatcagcaagacaatggcaaaaaagctgtcccgtgtcagtattttggatgaagaaacacaatcctatactaccgcagcttacctgattgcccagttgggaaagaactattctcttccaaagaacaaacgaatccctggaaatattctactgggatttgcactggaaaccatatccagtctcaaatattccgtaggcggcgttatggagtttcttgaatgcgaagataatgaattacttctgagcttttatacacagaatcatttcaagccatttgatactcgtattaccgcttcccagaataatgagtcacacactctgcatcagcttttaaaatttatttgatttaaaaatacatgaaaaaagcgacagtctgatttacattttgtatttcaggaaactgccgcttctttttcttccttattctgtttttcttcctccaactcccggaggacttcttcgccgtacttatcaatcatccgtaccagaaaatcaatgcaccgctcaaattcaatattctgttgcataagctcctcccgttattgtttgttctgagcttattttacagaacctgcctgaaaaccacattgaatagaatttgattgtaaattgacacaatcactttaaaaatatccgcattttcttgagtcgaatgtatgttcgtgctatgatagatatactcaatcttaactacgaaaggggaatttctattgaatcgatgcgatttttcttctattagcacttgcttaaaaagtcatatcagcgaaagtaatcaaatgagtcagcctgaatttttatacgaattatttgaagattttatggatgatccggcaaatcaggatttttcaatggataacggtctggtttgccgctggatgactggtcaggctaaaatcagtcctaaaatatccgcttactattccaagccatccaatcaggaaaagttagcccataccatccaccagaatcttcttccactgatgtctgactgtaatatggctatacaagatatttacactttattcattcaggatgacagcatctcagatgcgaaaaagaaaaatctgactcccttatataaaccagccagttcaagactgctgtttcttgcaaaactgatttcttttggcatggaacgccaattcatcaaacgtaatacccaaaatcagaagctactcgccggaggagctttatcccccattgtgctggattatattatggacagtgaggttccgaaaccatgccgtcattttatcggaagagataaagaactggaagaattatataccatgcttgaggaaaaccgtcatgtttttctttgcggaatcgccggaatcggaaaaagtgaacttgccaaagcctacacaaagcggtacataaagcaatacaccaatatcctttatgtagaatataccggcaatcttcatcaggatattactgacatggattttattgacgatcttccggaaagcactgaacaggaacagtttcaaagacataaccgtttcctgcgttccctgaaatctgatactctgcttatcatagataattttaatgtcactgccacacaggacagctttctgtcagtagtattaaaatatcgctgccagattttgtttacaaccagaagcaaactggatgaatactgtactctgccattaaaagaaatagaggacatgaacgctctcttccagctggcatcagcattttattcagaggcagacacgtaccggacaacagttgaaaagatcatcgaaactgttcactctcatacttttgccgtggaactggcagcaaaacttctggaaaatggaatctcgactccagaccagttattaacgagacttcaggtggaaaaagcatctttccataacgaagataaaattaaaataatcaaagatggacaaagcagcaaagccacctattatagtcatatccatacgctgttttctttatacactttatctcttaaacaacaggatatcatgtgtaatatgtgctttcttccttacactggtatttctgcccgcatatttgccaaatggctggaactgcctaccttaaataaaattaacgacttgattgaaactggttttgtgcagacaactacacgtcacacgatctccctgcatcctatgattaaggaaattgccctttcagagacaaaaccatctgtaagtagctgtcacatattactggattctttacagaaaatatgtttaatgcatggaattgaagtcgattattacaagaagctgtttcagacagcaggaaacatcatagaattgattgaaaaagatgatatatcaaaatatttactttttctggaaaatgtttttccatatatggataattataattaccagaaaggtatgaaagcaatcattcaggaattgaaggtgctgttaaagacaaaaagcattggcaccgactctgaccaggcgttattactggattttcaggcagcccttgaaaccaaacctgaaaaagcaataaaactggaaaaagatgcacttgcccagatagaaaatatcactgctgacaatgctcgcctcatttctaaccttcatgccaatcttggaggactttaccgcatgaacggttatcctgatcttgcaagagaacacatggaaaaaagcatctcactgcttgaccaatttaacctgcttcatataaatgacagcatacctcagattgccaattatgcaatgttcctgacagaacagcaggaacccgaaagaggaatctccgaattgcaaaaattatccggcatcatcaaggaataccattccgatgactgtctggattatgccaaagtacaggaaacccttggaaccatttatctgatgactgccaatcttccgcaagccaaaacacattttaaaagagctttcaaaatatatgaaaagatctgggctgatgaaccagaaatgattgaagtaaaatatcaggaaattcaggagttatatccacagattggattttgcattggaaaaaaactatccggtcttttaacaaaataagtacaatttacggcgggcaacttgcccgccgttatattcaactattcgtcaaataaatatatgcatcttccaaagtgatatcattatccaggacacaattctcatttggctttcctttgcttaatactttcatatgaattccattttctacatactgcttagatgaaatagaataattggcttctaacaaacgggcttcttctgcattttgtaccgtacaattccaaacacaaccctttgcattttccagcaacccactcacgcttccggaatataaaaaacttccttttttcataatggcaagctgtgtacaggttgctgctaaatcttctactacatgagtggaaaacagcacagttctatcctttgaaaaatcaaccagaagattgcggatcctaattctttcttccggatctaacccagttgttggttcatcaataatcaaaaaatccggattattaagaagtgcctgtatgagtccgacacgtctcttcataccaccagataattgccgcatttttttattctgatgctctgtaagagaagtcttttccagataataggtaattctttgttcgaggtcatttctggctactcctgacagtcctcccatatatacaagacattctttcaccgtaagattcggatataagtcgatttcctgtggaagataaccaatctttttctgtattttctcataatttccctcgttatacagaattccatcaagggaaaccattccttccgtttgttttaaaacggttgtaagaaccctcatcaaagtggtttttccagcaccattctcacccaaaagtccgtaaattcccttgggtatttcaagagatgccttatttactgcaactacaccatttttaaatctaactgttaaatcatttattctaatactcataatctatcctcttttctttaaagccattggtaatactgcaaataaaaacagccccgctataagagacacaagcgttccataaatccaactctcggacattaattgagtaggttcacaaaagctgaaagaaaacaatcccagatttccgaaaaatgaacttcccgcttttgatataagtccaatgacaattccaaataaacatccaatacctgcccacatatttcgaagcaatgtacacaaaatcacagagcatatactccaaaaccagatagttccaaacattgtaatgaaatataaaagaaatatctgaatacccgaaatgccttcgtttacactgcccggtttttgccagaaaaacaaaacatatccaacacaagaaagtattaataaatataatatttgaacgcccactctctgcgatattacttttaactgctttttttgatcatacaaatgaaatacatcggcacgtttactttttacttccatcaaatatgtgtcactacaaaaaataattgttaaaaatgctattggagactgaattgctgaaccgatttcttcatagtatataatcggatgaataacacacaatatcagtataaatgcacatgaataaaaaatcttatataacgacaggcagttttttagttccgttttcaatgaaccctcctccttttccagattgtaacagaaatacatactaatataattgatgaaattacaagaataatctgatttatgtttgacatttcggctacatgtgtttcaaaaaatctgccagggaatcgcaccataatagagaacggtctcatataataaatatcattcttcatggtcagcatatttgaatatataatgtgtaaaaacaagattggtgctgccggaagcggatttttaaatattactgctgtaattgtatagacacaacatatcatcaaaagattcggaataatatagatcagagaattcacgcaaaaatcaattggtgttactggaaagcccgattctaaagacgttttcaaacacagcataaagaatataacattcaaaatcactaatattcccagcatactaatgaatccgcttattactttcccacatatatattggactgccgtaacaggctttgtatgtaataattcataggtactttttcgtgtatcctgaataaataaaaatgatagcaagactgttgcaaaaaaggccatatgcaatcctgcaaaatccgtaaattttttggcaaagtaccaggaaaaagaatgttcggataatttccgctcgatataatgattgatttcttctgctgtccccttatgaatttcaaggtcctcataagcatatattgcattataatagccatattgggattccaaaaactcagaagcagtctttacatccatattctgaatttctttcattacatgatctgcttcctgcctgctaaatccaaaaccattttgggaggtgtccattaacgtctctttgatcgtatcttcccactcccttcttctttctttatcatcagatgtgggaatgtacccatccatgacatcagcatcttccaatgctacgtcattttgtgtgatctgttcattctgtttgatataatgaatttgcaaatacgatgacagacattgatacatactggcaactataataatcaagccaatccacaaaacagggttctttaaataatcaagtatacttctttttatgattgttttcattgtatctcttcctttctttatttctttaacaacatcatacaaatcaattctcaataaattcacaataaaaaagactaaaaccactttatttgtgatttcagccttataaagtatttttattcagctttgaaaagagcttctacatgagcaccgccttgtctggcattatatattttcaaatttcctccatgcttttcacagaaaatacgagaaatatacataccaaggccaaaatgctttaaatcatcttgtggattcttatgataaaatggttctgttactttttcctcagtatccacaaatcctattccatcatcttcaacagaaattataagaaaaccatcctttttctttatctgcaaagcaatacttttttgtgcatatcgaaccgcattttccagtaagttgtctgtcacttccatgacaagttcctcatccactttcacaatgttttgttcctgcactctttctaccttacataatttactttccttcttggacagcatggcagcttctgcctcaatcttttttgccagttccgataactctatctctgagcattgcagttccctctgttctaaatgggacatttttctcatgttttccgtgaaatgctctatacggtcaatctgatacatgcctgtttgtaagatatcaataacatcctctgtttttatactctcggcagaaacaaactctaagagcatttcctgatacccacgcaatatggaaagtggagaacgtatatcatgtgcaattgcattccgcaaagccttctcgtcatcaatcattcgccacatctttctgttgttatctgctaaatcacttcgcatcatttcaaattctttacacaaagttcccatctcatctttattttcataggacacatgaaaatccagttcattatctgcaatcatttgtgaggcatcttttagttcctgtagaggtgtctttaacttatttttataaaaaaagaataccgcaacaacactcccaacaatcgaaaaaatcagtaccgaatatgtttccataaagtcacacatttccgaaagatgatagtccaaacgattcatctgcgattgattaggtcttgatatctcaatctcgtatttctttccatattgctgaaacacgtccgtataatctgcataatcaatatatttttcccatattttattctgcatatttcctgcaaaatgaactgtaaatccagataacagaaatgctgccgttaagctgatcacaaaataaagcagaattgtttttttcagtgacaagtttcttattttttccatcggtatccaatcccccatacagtttctatgtattctttttctgaataatccgctatttttttccttatacgccgtactaattccgttatcgttctactgtccccttccgcatcatatccacagacttgtgcatatatacgttctttatcaaacacctgccctggatgcatggataagaattcaataatctgatattcaatttttgtgaactccatcctttgtccggctatagctactattttttcagaataatcaatcagcatttcatccatgaaacggtattccgttttttgttgatgcctttcttctctctttatgtttgtgacaatccttgcttccaactcccgaagactaaatggtttcgtaatatagtcatccccacccgaaagcaacccattaattttatcatcttcatcaactcttgctgttagaaacaaaatcgggcataacactttactgcgtatcagacgacatacttcaatcccatccatgcgtggcatattgatatccaacaaaataatatccggtttcatttttattttatttaatgcttccattccgtctgtagccgtaatggtttcatattgtttcatattaaaataactacaaagcattttcaccaattctttatcatcatcgacaactaaaatcttgtatttcatccaaaccacctccagtatccatattatacgataaaaaacaatgaaatcacaacaagagtacatgaagaatgtacgcacaatatatcttttttctcaattccagctcaatttccactcaatgtcttttacctccgattttcgtatgcttatctcacagcaaagcagtaccacaccggtatgacctgctgaatcaatcaatacgaaaacggaggtattttttatgcgagaactcaaaaacacaaaaatcatcgctgtagatcatggctatggcaatatgaaaacagcaaacaccgtcacgccaaccggaatcaaagcctatgaaacagaaccaatcttcactggaaatatcctggaatataacggcatttactaccggattggcgaaggacacaaagaatttatcccggataaagctatggacgaagaatattatcttctgacgctaatggctattgcaagggaactgaatgtcttttccatccgtgaagcagatgttcatctggctgccggacttcctctgacatggatcagaaatcaaagagaagcttttcgttcctatctgctccagaatccagaagtccattaccgtttcaacggcaaagaatatcatctccactttgcgggatgtagcctttacccacagggatatccggctattgtaaaccaccttggaaatttcaagggaactaatctccttgcagatatcggaaacggaaccatgaacattctgtatattaacaataagaaagcgcaagaaagccgatgctggacagaaaaacttggtgtaaaccagtgcatgattgccgcaaagaacgctgttctggacaaattcggagtgaaaattgacgaatccacagtagaacagattctgcggtttggaacagctgacatttcagcaccatatctggattgtatcagttctattgccagacagtatgtggcagaacttttttccacgctccgcaaatatgaatataatcctgacctgatgcgcctgtatgtggttggcggcgatggatgcctgatccgtaacttcggaacgtatgacaaatcacgagtcacaatcattgatgacatctgcgccactgccaaaggttacgaatctctggcttatatgagcctgaaaaggaggggataaaccatgcagaacaatatccgcaacacaaacctgcgctttaatctggacaaagaacaacagcggagagcctgggaatatttacagacgatggacaggcaggattttaaatcttacagtcaggtaatctctcttgcactggtagattattttgaccgctactaccgcacacaggctgatccttatctggaaacaagagaacgggaagaactttttgtgaaacagattgtagatgcagtggaaaacagtctgaaacaggaattgccactttttctttccggactgactgtaggcatggcgcaaagggagccccaaatcagggcgtcctttccaacacctgaaaattcacagccggataatgatgtagactgggattttcttggagaataactgattggaggtgaacacatgacggactttctgacagcagacaccaacctgccatcttatatgatgtttccccgtttccttctggacatggaaataaacgaaactgccaaaatgctttatattatcctgctcgaccgggcaaggctttcccagaaaaatgagggctggtcagatatcgatggtcatgtgttcatttactttacaattgaagcactggcagaagttctccacaaaagccagatgacgattaaaactgctctggcagtactggaaaaacaggagcttatcttccgaaaacggcagggacccggacagcccaatcgaatttatgtaaaactcccaaaagaaaccatccactatacagacagatttctttccctaagacagacagaaaactgtcctattgacagacaggattctttccctgatacagacagaaaactgtctggtaataagaaagagataaaaaagaacaatttagcaataagagggagtaaggagccactctcaccctatggaaaatttcaaaatgtttttctgtcagaaaaagagcttgaagatatccggcagacaatccctgactggaaggattatattgaacgcttatccggttatatggcttctaccggaaagcaatatcagaaccatgcagctaccatcatcagttgggcaagacaggatcatcctgcttcccggcaaagaaattacgaaagtgaggaatacgaaacactatgacaagatttacagaaaaagcaaccgctataacaccaaacagagagcttcagcctgatgaatattttaacgaaacagaccacctgatctactgttccaaatgcaatacgccaagacaatgccggcatgaattacagggaaaggttcttattccttccatccgctgtaaatgccagcaggaaatctttgagcaggaagaaacccagagaaaacttcatgaaaaacaaatggaaatagagcatcttaaaaccagcggcttacaggacaaagcactctatgactacacttttgccagggataacggcatcaatccggaaataaaactggcacacaattatgtaagcaactgggaagagatgaaagcaaacgcctccggacttctcatctggggtgatgtaggtactggaaaatctttttttgcaggctgcattgccaatgccctgctggaaaaaagcgttcctgtactgatgaccaacttttcccagattctgaatacccttaccggaatgcattttgaagacagaaaccagttcatcaacagcttaaaccgctacagtcttctgattattgatgatctcggaattgagcggaactctgactttgcactggaacaggtattcaatgtgatcgacagtcgttaccgcagtaaaaagcccctgatcataacgaccaatctcactttatcagagctgaataatgccgctgatatcgcacacaaacgaatttatgaccgtattctggagagatgtattcctgtccgtatcaataaccggaatatccgtcaggacaatgcaacagataatttaaaacgggcgaaaaaaatcctgttgaacaatcatgctccgaaccagaattgactcgaagaagtataacgcaatgattgtttttcactgacagtggtactactttctttcctcatttattaccagaaatcatctggcgggcaaactgggcagatgccgtaaataaaatgcttgcacgtaatcagataaatgctaccattgatcaccgtagctttgcagatcagggaatcaccgaacagccaaccatccatgaaggctacattgcccagaatatggaaaagaaaggcatgatagcagaccgctgtgaaatcaaccgtcagattcgtgcagataacaaaatgctccgggaattaaaagcccaggtagcaaaactggcacaggctgtagaaaaatctattccaataatagcagaaacattggaagcaatccgcaatcacatgatttttacacaatatcatttgctccacaatgagatgcaaaaagaagtgatccatgactggatgaatcattttaatccaatactgaataaatacaacacagttaaaaagaaactcaaagctaaagttacggaacggaaagaactgaatgtgcaaaaggataaaaccagtattttgaatcccatccagcatataaaattaaatcagcagcttaccactattaccgaagaaatcgaagaactgaaatcaaggaaagagcagctaatcttccaggcagaatgctctaccgataaagatatgacgaatctatccaagaaatacggccagatgaataacaatcttgatatcctggattctcaggacatctcgctcaaaaaacagcttgaaaaagatgccgccgctttccgggaagaaaaatttcgtcctgaacctgaacagtatacagaattgctggacaccagaatccagatacgtcctgatttccgggataagctgattgagcagctcaaaggtacttttggtaagtattatgactatcaccgccgtgatattgccgccaatgaggtagattatctcaatgtggaagatcctgatgttttttcctatcgtgcctgggaacttgaatatcagaggaaacaggagatgcggcgaaatcagcctgctcgaactaagaaatggtcgtatgatatggaattataatttggttcttctttgcccattataaacacaagagctgaacaaataggatttttcgtcctcttatcacagcggccagacgataaaatgtcagatgagcagttggaacagcttgccccatggagcgagactgcgaaaacgaactgtcaaaactaaaatagagaaagacgcttgcatctatcattttggtgcaagcgtaattcatgagtaacgtagcaatattttgcgcttacgcacattttgcccttattcaatccgcaacctaaacccttcttgttgtcggaaacatatcgagtttttctagttgctactattctgaatagtatatcaccgcgaacacttgtttgtaatattaatctacaaaataacgaaaatatctgacagccgcgaaaatcgtgcactccccctttatgattcttatggtaacaaaccggctgtcctaataaatggacagccggttgcactcatatttcaccttactttcaacccattcgagtatccagcgttaaccattattcgtcgcattatttcatacgagacgccatatttttgtgcaagctgtctaattgtcttttgacgaccagcatattctttaatggcagttttcttttctgattcagacaaaaaataaatcatactagtgtgctcctttctcttttttgtaagttaaggatagcaccgtttttctccaaaatacttaagtacgaaatttaaaaattttcttgggttaaaaatgcccatagcatctgcccaatatatacatctgcataccgatggttatcagtctgcttaccatacttatcaccgaaatactctacgtacgcatcattaatatcctctatttcctcagcagtcaccggaaaaatagctggctcgtcattttttattgcctctaaacgctgctccaatgccataacttctagttttgcttccgcaagttgcttctcataaaatgctacaattgcatctttaccctccatctcgccagattcaattttttcggcccagtttttccaagcagaagctcctttggaatatgtatttgttgtatattcttcaaactctgacgagacataccatgactgtaccattttgtaatacacatcccttacagcgccaacatcagattcctcatcttttatagactcatactgtatttcttccttatcgctattcatctctaatgcaatagccttaatcaactctgccaagccaacgtctagaccaacattttgagtacctattgctggtttttgcatagaactcatgttaaaaggatttggaaatacaccaaattgagcgatccaagggacagcctctataagcttattattcatgtattccatgtatgtcattttatccaaattaatagcaagagcctgacaaagcttacctatattttcctctggttgatccatatgcgtttctgtaaataatgccaatccatttactactctttccgcccatattacaagacactttgtagtaaaatgactctggcaagatttatatataagtcctctcaattcttttggaagatcatctacatcttttaataatgccctataaaaattacaaatctgagtcactgtaacattatctctgttagcattttttctacttgaagggtttttatcccaattttttattagaattgccaataattcagcacaaacaacaggataaaagttttctcctccctcaatgctagaatccattttaaaaagagttggatctatttcatatctctcaaagactttatctcttttgttttcaaaagtactgctggctttcattccgcaaagctttaccatctctgaagtcgaataatcagcaagccttctttttttctgctttggcacaaaatccctcctttctaagaataagtattttacccaaagtcatatattaagctgaaaatttaccatatcagagagcgacgtaatattctcatccaatatcagtttttcttcttttatttttactcttccattcgccgaagaaagactttcatgtgttttacataaacaatcgaataaagcttttattttatctttatctattcttgaaagataataaattgagaaaattgtaaaatctccccacaacgaggcaattatgccataatcactttctgcgaatcgagttactatattttcaaataaaagattccatgtattatcattgaacatttcataataacgttcaaatacatcgctaattccgctgcctatataaccatacttgctttcagatcaaacgatatcccatataatgctgaatccattacatattcaacatcaatcagtttcaacacctcatcagtggccttacatgatcaaaacattgcacaaagaactttataagttctttatcttcatgttgctcctctgctgttgcttcttccaaatcaagaactgccatttgctctgaaatttccttccattttttcaatttagcaatcgtatatctattcacatctgaatctattaattttgaacacgactggcataaccatattccattttctgctgatgctctctcttgagacgttatgttctcatcataccttggtccgcctttagaagctgctgtaatatgagatgcaactccaatatttatgatattctcttttcctattcctgctccacgagttgcttttctacaattaggattgctgcatttccatccaactctattagctaacaaatcctttgttctttgtgaaaaatcatctctcatataattttacctccaccttacactttatcatctttaaattttctataatcaacgaaaagctcccgaaagagctttccattaccttaaatatacactaattcttttaacacaatctcttctgtcctactacgaataccatttaccactctgacccattccatctgatcacgaactttcaattcctccgtaatcccctgcttctccatcatctgacgcaccagaatatccatcctttcctgtgcttcatcgtctacaacattcagatgttctgtcaatctgtcttccaacatatacagtgaatacattgccggacgatgctctttcagatatgttttccgcatcattccatatttcccataatgcggttcttcatctgtactgacaagattcggatagtaaattccgtctgcgccaagtgtgtaggtttcccccattttttcaaatgtgcttttcatgtgttattcctccttgaaatcagcgatttccttagatcatcgcaaaatatttcagggcagccttgatagcttcttccttctctttcgggcattgtggaactcttgcattttctgattttggaagattatagttttctcccacttcaattccacatttgcgttttacctgagaaatatataaacttgaaaccttcaagccaaattctttcagcacataatctttgatttcctgataggttgctttcaactcggcactggtggcatccagctcgtccaggtctaagtctatctctatcgtgtcatctggtttttattgggacaaaagaacaaccgtctccacatgcaccgtctcacaaaactgatccaccgccgtcatcttctccacacgatatcccgccagctgcatcatctccagatcacgtgccagactggtcatcttacaggaaatatatacaatcttatccaccccataattcaagatcttcgggagtgccttcggatggattccgtctctcggcggatccagtacgatcacatccggcttctcttcaatctcatcaagtaccttaaacacatctccggcaataaatctgcagttggaaagtccgtttcggacagcattttcttttgctgcctcgactgcttcttcaataatctcgacaccgatcactttcttcgcaaccggagcaagcacctgaccgattgttcctgttccgctgaacagatcgaatacaacctgattatcaatatctccaatgtattctcttacagtctcgtacagcacttctgcaccttttgaatttggctggaagaaggaaaatggtgtaatcttgaattccagtccgagaagcttctcgtaaaagaagtcctgtccataaagaattcttgtctcatcactcttcacgacatcggacagagagtcattcaatatatgaaggattccaacaatctttccttctaattctaatgccagaagttcttctactaatggagtcaagtcatattcttcctgcgttgtcgttacaagattcacaagaatctcgcctgttgtatcgcctcgtcttaaaagaagatggcgaagataaccgacatgctgcattttcttgtaataactcacatttctttctttgaaataattcagcacacaaaggagaatcttatccatatcttcatggacaagctgacagtctcctgctgtcagtacatcataagtacttccttttttatgaagaccgagagataacggaccgtctttgaattcgtctccaaaagaaaattccatcttgttacggtaatgaaattccttcgggctgtgcttcacaccctcgaaaagatactcgccctttactaccggatccatgatcctgcggatctgcccttctttcatcttcacctgttcttcgtatggcattgtctgatacatacagccaccacaggcaggaaagatactgcagaccggctcccttgtctccagtggagatttctccaacacttcaagaagtcttccttctgcatttcctcttttaaacttgtttatcataaaacggatcttctgtcccggaatcccatttttcacaataacatactgttcttcctccggaacaaatacaatccccttgtttgggaaatctacacgttcaataatcccttcgtagatctgaccttttttcatccttttctcctatcaattctaatctatttttaacagaaaaacagacaggatggtttcttctcacaccctgtctgcacttttgcaattcactcaagaattatacctgatcatcctcgctgaagtaatcatcaaaatcgtcatcaaaatcatcttcaaaatcatcaagataatccggtgatacgaaacgatatactgcataagcgattgcagctactgctgctactgctccgatgatagccagtgtccagattactgtgttcttctgcttctcagcctcattcttatgaagaatctcgttcaatcttgtttctgcaatgatgtcttctattctcttgttcatattaacacgtcctttcttcaccttttgtggtgacagataatctgtgtttattataacacctgacgattcatattactactgatttatcatttttttataactttctcatacctttacaagcttggcaaattttgcaaacatcttgcgtgttccgacactgtcaaattcaatcgtaacctcgtgatctcgtccgccttctttgatatccgttactgttccttccccaaacttcacatgacgtacccggtctccgacctcataaccaagtggaccatttccacctgctgccagctgactgcccttctgcagggatgccagtgcctgacttcctgtaactgtcttactcgttccctgattcttcgcaggtgccattccgccaaatgctcctccgaatgcctgtgcccgaaatgcttctctggcacgtgcatatgtattctgttgtgctggcatctccgtctcctgagtaaacttcttgtttcctgtatcaagcagttccctcgggatctctttcacaaatcttgacatcggattgtactgtgtctcaccgtgcaccattcttctgcgcgcacttgtcaaagtcagttcctgctctgcccttgtaattccaacataacaaagtcttcgctcttcttccagttcttctctgtctcccgcattaatactcatatatcccgggaaaagtccatcttccatccccgcaagataaacacgtggaaattcaagtccctttgcactatgtaaagtcatcagaacaacatgttcctggtcttcatccagactgtcaatatccgcaaccaaagcaacttcttcaaggaatccactcaatgttgccttttcatctttatcctgacaactttcctcataagttgccgctttactgatcagctcatctatattctcttttcttgttttcgcctcttctttatcttcattttcaaggctttctatatatcctgtcttctcaatcacttcctgtaaaagatctgtgatactcatctcttctgccaacgtcttaaaatactcgatcaatgccgcaaaagagtccagttttgttgcacttcttcccactcctgcgatcagccccggtgccagtaaagcctcataaaacccaattccacgttctgtcgcagactcctgaatccggttaattgttgtaagaccgattcctctctttgggacattaatgattcttctaaccgcaacatcatcacgtccattgtcgattgtcttgagataagcaagaagatccttaatctctcttctcgcatagaaattcactccaccgacaatcttataaggaatgttcatggcaataaacttctcttccagcagacgggattgtgcattcgtacgataaagaactgcactgtcattataggaacctccctgtctgacagcacttttgatatcttcgccaatgaaatctgcctcatcaaacgcagtatcgaactgacgcagacgaatcagttcgccttctccgttctccgtccaaagtgatttttcctttcttccacggttattcgcaatcacgctgttcgctgcattcagaatattccctgtagatctgtagttctgctccagtttgatcacctttgcatccggaaattcatgctcaaagtcaagaatatttcggatattcgctccacggaacttgtagattgactgatcatcatctccaacgacgcaaagattcttatattttcctgcaagaaggcttaccagctgaaactgaactgtatttgtatcctgatattcatctaccataatatagcggaatctttcctgataactctcaagcacatccggctgtgtctgcaaaagctgtactgtctttacaagcagatcatcaaaatccagcgcattattcgccttcatctgcgcctcatactcacggtaaaccttagcaatcttcatctttgcaaagtctcctccggcattcagttcaaattcatccggaaggatcatctcattcttggcagatgaaattgctgaaagcagacttctttctttaaacactttcgtatccacatctactttccgacagacttccttaattaatgtcttctgatcatctgtatcatatatagtaaaatgattctcataccctaatctgtcaataaatcttctcaaaatacgcacacatgcagaatgaaatgtgctcacccatacactttctgctccaaaaccgacaaggttatccacacgctggcgcatctcttctgccgctttgttcgtaaatgtgattgcaaggatattccatgggttcacgccacgttctccgatcagatatgcgatcctgtgcgtcagaactcttgtttttcctgaaccggctccggcaaggattagaagaggaccgtccgtgtggtaaacagcctctctctgtggttcatttaatttatcataaatgctcatctttccactcctttaaagttataaagatatctgtaaatgtattcccattatcaaacacacgttcctgtttgtcaactacattttccggccctcttatcttttgcttgctatctagttttaaatactatataataaatgtattgaggtgataacatgaatatagacacaagtaatctgttaaacagcattttggaagaactttcttctttaagttatgtgcatcccggcgatgttccgaatattgatctttatatggatcaagtaactacttttatggatgagcagctggcttcgaccaaacgttaccctgatgataagatcctgacaaagaccatgatcaataattatacgaagaacaatcttcttccacccccggtgaagaagaagtattccagagagcacctgctccttctggtcttcatttattattttaaaaatatcctttcaatcaaagatattgagacagttcttgcaccgctcacagagaaatattttccggatggaagctcttttgaattagcggatatttacaaagaagtctgcaagattgaaaaagaacagctggattccatcaaagagaatgtaactgctacttatgagaaatctgctgagactttcactcatcttgctgatggcgaagataaggagatcttacagcagtttgcatttatatgcagcttgagttttgatgtatatatcaagaaaatgatcattgaacggatcattgatgacctctcttccaagtcttcaaaaaacgaagagaaaaagaaagggaaataaacatttctgtttaaaacgagatacagcctgcgaaagactttatcaggatcttccgcaagctgtatcttttgattgataaaaggtattttattgtaagcttaattcttaagtgttattcttccgttccattctcttcctcagcaagccctacacgtttgaaaaccatatcatatccgtcattcccgtaattaagagaacggttcacacgactgattgtcgcagtggatgctcctgtcttctctgcgatttccagatatgtcttctgttcacggagcattcttgccacttcaaatctctgtgacaatgaaagcagctcattgatcgtacagatgtcttcaaaaaatgtataacactcttctttattctcaaggcttaagattgcctgaaacagataatctactgcctctgttctgatcttcttactcatacgaaacaatctccttctcaaccggctaattatatgatggcttacggcataccataaaccataacaataccttttgccttctcaggccactttttgattttaacacattaaatttttaaagtccaccatttcttatgaatttaaactaaattcttgcgcaattttgatttttttctaaaacattttatgtaaaacacacttttttcgttgttcttcctcttttaagatgctataataaatctgttataaatattttgatacaaaagagaggagtacatgattaatatgaagtgcccaatatgtggaaaagacctggatttgcagaataagcagattggcaccagcgaaaacggggatccaatctttaatgaatatgcaatctgccatagctgtaaaaagcaatggaaccttgataaacaacgtgcaaagaagatcgctgccaagaaagctgcagaagagaaagcaaaagctgaggctgaggctcgtgccgctgaagagaaggcaaaagctgaggctgaggcccgcgctgctgaagagaaagcgaaagctgaagctgccgctcgtgctgctgaagaaaaagcgaaagccgaagctgctgcccgtgccgctgaagaaaaagcgaaagctgaggctgccgcccgtgccgctgaagagaaacgagctgcccgcagagaagcaaaagcccgcgcccgcaaagaagcgattgcccgccttgctgctgacaaagggatttcagaagaggaagctgagcgtatccttaaggagagagccagagcacgcaaagccgctgcacagaaagctgccactgctcccactgatgctactgatgattccgaagagcagaaatatgggaatattccagcggaagagatccgtgataagcgtgaaaaagcagttcgcaagggatacgaagatatgcttgcaactgatcctgacagtaaagctgccaagaagaaaaagaaagaggaagccgaaactgcgaaagcaaaagaagatgtaaaatccagaaaaatggatgactatgatgatgagaaatcctctgatgatgaagatgatgatgaatatgaatatgtagatgaatatccacgtttcagacctgggcgcattatccttggaatcatttccctgcttgcatttggtttctgtatttataaaggattcgtaacaggactcagcacatcaggagctgacgtaacttctgctccaggcatgaattatgtcattgttgctctttgtatgcttgtcactgcactgttatacttcatcatgaataaccgtgatacactttttgcattccttatcccgatgattgtctatatcggtagtgctgtttttgctttcctgaaacatggagatgaattcgagcttctgattttagccggtgtaagtggtgtacttgctgttatttcactgattctcgcaattgcttcccgcggtggagatgattacgatgatgaagatgattacgacgatccatttgaagaagaacacgataattaaaatcgcgttgtaaatctttttggtttctaagaacaatttatataagataattacaagggagtatcattttgcgatacttcccttttttgtcctgatatgcattttttatatcatatatctaaaatatttttaggtgtcaaatttttttttagaatagttgttgctttttgttgaatatgtgataaaatgtaaccataggtatctttatataattaaaaatacacaacaaacacatactcctcaaagatttttctttggggattttgtcacaaagaaaggagtaactgacatggcatcatttatagtaaatggtcaggaagtctcaccctcaaagaatcagaaactgttacggttcctgcgtgatgagctgcacattacctctgcaaaggatggctgcagcgaaggcgcttgtggagcctgtactgttatcattgatggacagacttgcaaatcctgcgtacctgacacagattcattggccggaaagaatgtcatcacagtcgagggactttctgattgggaacagaaagtttacacttatgcttacgggaaggcaggcgctgtacagtgcggattctgtattcctggtatggttatgtgcacaaaagcacttttggatgtaaatccggaaccaaccgatgatgagattcgctatgcgctgcgcaacaactattgccgctgtacaggatatgttaagatcatggacgcggtacgtctggcagctaagattctgaaagaaggggttttaccagatgatggagattctagctggactcttggttcccgtgtttctcgtatagatgttgaagaaaaagtgcttggaacaggtaaatatccggatgactattatccggaaggaatgctctatggcgctgctcttcgtagcaaatatccacgagctcgcgtactttctattgatacctctgctgccgaggctctgcctggcgtagaagcagttgtaacagccgatgatattcctggggagaataagatcggacacttaaaacatgatcagtattcactgattccggttggtggactgactcattatctcggagatgcaattgcccttatagctgcaactgacatggcaactgtagaaaaagcaaagaaacttattaaaattgaatatgaagtacttcctcatgtgcatacagtggaagaagctgctgctccggatgcacctcttgtttatgatgaagaagagactaacgtatgtgcttataagcacatcagccgcggaaatgcggaagaagcaatcaagaattccaagtacgtgatctcacatcactttgagacaccttggactgagcatgctttccttgaaccggaatgtgctgtttctttctatgatgaagacggtgacattttcgtatattcaacagaccagtctgctcaccagacactacacgaagttacacttatgcttggaacggataaagtaaaggttcagaacgcattagtcggcggtggtttcggtggcaaagaagacatgactgttcagcatttaggtgcattgcttacttatgtaacaaagaaaccgatcaagatgaaattatccagagcagaatccttgcttgttcatccaaaacgtcacccattctacatggatatgacaatgggatgcgatgagaacggagtgatccagggtgtaaaagcgattgttaaatctgacacaggtgcattcgcttctcttggtggcccggttcttgaacgtgcatgtacacatgcagcaggaccttaccattatgaaaactttgagattgaaggaactgcttactatacaaataacccaccagccggagcattccgcggatttggtgttacacagacttgtttcgcaacagagacacttctgaacatgatggccgacaaagttggtatcacaccttgggaaatccattaccgtaatgcgatccgtccaggcgaagtacttccaaacggacagattgtagataactctacaggtcttgtagagacacttgaggctgtcaaagaagagtatgatgctgcgcttgcggccggtaaggctgttggccttggttgtgctatgaagaatgccggcgttggtgttggtatcccggatacaggacgtgtaaaattaatagttgaagaagatgaaaaacttcacatcttcactggtgcttcctgtatcggtcagggacttggtactgtacttgtacagatgatcgttacaaatacagatctttcccgtgatgatatcgtctatgagcgaagcaacacatggatttcacctgattccggtacaacttccggttctcgtcagacacttgtaactggtgaagcgtgccgcagagcatgtgaaaaattcatggaagcgaaaaacagcggtaaatccatgaaagatatgattggagaaaccttctacggagaatatctcgctaagactcatccacttggtgcagatgtgcctaatccaatatctcacgttgcttatggatatgcaactcaagtctgcatccttgatcctaagacaggtaagattgagaaaatgattgccgcacacgatgttggtaaagctgtcaatccactctcctgcgaaggtcagatcgaaggcggtgttgtaatgtctatgggatatgcactcagagagcagtatccaatcgatgaaaactgtaaaccaattgacaaatatggttccttagggcttttccgttctcacgaaattcctgagattgaagcaatcgttgttgataaacctggtctggatgttgcctgtggagcaatcggtatcggagagatcacatccatccctactgctcctgcaatcgcagatgcatattgcagatttgacggagaaagacgctacagccttcctctttctaacacaccatatgaaaggaagaaataatcatggcaattaaaaagagatttccttaccgggcagctctggttgcctgtaacggtggctgccgcgcagccggctctgaagacggtggatgcaaagatggctgcatcggatgtggagcctgtatagaaaaatgtaaattcggcgcgatttccatgaatgaatatggcgttgccgaagtagacgaagaaaaatgtattgcctgtggacagtgtgcaaaagtctgtccgcagaacctgatcaagattcacgaatgtgcaaactacattgtagtaaaatgctctaacaaagaaaaaggagctgtagcacgtaagcagtgtgaagtcagctgtattggatgcggtatctgtgagaaaacatgtaccgccggtgcaattcatgtagaagataattgtgctgtgatcgacgaagagatttgcttaagctgtggaatgtgttctgttaaatgcccaagacatgtaatccatgatctccgcggagtatttacagcagtaagataatacaaaagctatcgactacgataacaacacaggtatgtgttaagttattgtaatcgatagcttttttatctactcatcttcatccagaaactcgatatcatcatcgtcatcgagataatctaaatcatccagatcttccaaatcatctaagtcatctagattttccagatcattcaagtcatctaagtcatccggatcttcatcaaaatcataatcctctgtcgcatctgcctcatcagcagttacttcaatttcgacgtcttcctcccaatcttcctcgtctacatcaaacttctcttctttaaagttctccacttcatcctcttccagatcatcttcaagatcatcaaattcatccatgctgacaactgttgtgcccttgtcttctttccggacattttccggaagactctcgataatctcatccagctcatcaaaatcatccagattctcaaccagtgcccttgccttctcgacttcattttctgtagaatgttcttcacggatctctgcagctttaagtaaattctttttcttacgttttccggattccaaaagaagctggatccagatactaagtacaccaattgcaacacaaagtgccacatgaatcattccgtttttatatggctgcagataaaagatactgctgcccgctgccattgctccaaatacagaagaagaagcaatcagcataaagttatgaaacttaatagaaagcaatgcacacacaagaccaatacccgcacagattccatacataataaaatcctgtggtttcatcaaatgtacactgacaacaaagacgagtaccgctacagtcacaaatccaccaatctgcttcttccatgcaccaagcaccgccaatacaagtcccacacctgctcccgccgccaatgagatcatctgatctagacctgcaatcactccgaccgcaattccagctgcacatcctgccgacaatcctgcgatcacagaccaaaaacgtactaacttcagccccgtcagacataacagtactgctccgaccgttataacgatcagagaaacaaattccatctgactcaaatgatgactgctttcattaagtccagccagaacaacatccaggtcaaaattcagaattgtatcaatcatatcatttacattcattatttacaccttcgtcccttactatttattactcactactgctcattttagcaattttttttactgattacaagtgttcatttcacctttccattgacttcttattcttctccacttaaaatagaagagaaatgctattgctgaccgcataatactatgaacagcaatgaaatgctaacataaaggagtttattatggaacagttaagaatacctgctggctatcattcccctcttacaattcgtgagacagaagtagccatcaaagaagtgaaagaccacttcgagcgtgctctagcaaagaatctccacctgacacgagtgtcagcaccactgtttgtccgtccagaatctggtctgaatgataacttaaacggtgttgaacgtccggtttcctttgacatcaaagaacaggatggttctgttgcagagatcgttcattctcttgcaaaatggaagagatatgcattgaagaattataatttccattccggcgaaggactttacacagatatgagtgcgatacgtcgtgatgaagatacagacaacatccactctctgtatgttgaccagtgggactgggaaaaagtaatttctaaggaagaacgtaacacagagacacttcagtatactgtccgcaaagtctaccgggctctgaaagatacagaagaatacatttccagacgttacaactatattgatcctcttcttcctgatgatatctttttcatcactacacaggagctggaagacctttatccggatcttactaccaaagaacgtgaaaaagcgattgcgaaggaaaaaggcgcagtgtttatctccaagattggtggcgtacttgcttccggcgaaagacatgacggtcgtgctccggactatgatgactgggagctgaacggtgacattatcgtttactatccggttcttgacatcggtcttgaactctcttctatgggaatccgtgttgacgaagactcgttaaaggcacagctcaaagaagccggatgtgaagatcgtgcagaacttccattccagaaggcactgctcaacggcgagcttccatatacagtcggcggcggtatcggacagtcccgtatctgtatgtattacttaagaaaggctcatatcggtgaagtacagtcttccctctggcctgaaaatgtagttgaagctgctgctgatgccggcatccaccttctctaaacacaagacagaccagccaattatatgataaaaagcagattcgaattctactggagcatctctcctttgaattcgaatctgcttttttattctcctcttattctacaatcagcaactgttctttctcttcctcagacaccctgttccaaaaaacattaaaatcatcaaattccggcaaatagatatctgccgtattccaaatctgtgccagattcttgtcatttgccttatcataaactgctactgtcttaaatcctgcatgttttgccgtcctcagagcctgataagtatcttcaaacacccaggtctgttccggctccgtatccaactgcaaaagtgctgcgaaataaatatccggctgatccttaccgtttccgatctcagatgctgtaaaaaccccttgaaaataagacaataccttcaatctgctcagagctgcttctgcattcttccggtcacctgttgttgcgatcaccataggaatctttcgctctctgaattcctccagatactgacgaactccttctttcagtggaacacgctttgcataataatcttccacttccttattcagcccgtgtacaacctcttccactgtcttctccaggttataatgtgagatcagataatctgccgcctcctccaggctcatctcaaataatgtctctcccagattcttctcggcctcaattcccaaatgatccagatacaattctccaagattctcccagacaggcatggaattgagaaggacaccatctacgtcaaatattacaccttttatcatgtcattcctcttttctgctatgcactacattataatctccctggaaacgcatgtcaaccgttactgttcacacgatgtgcgaccagcaacgcatctcgccattttaaatcgcctttggcgatggggcgagatacattcaagtcaaaacacgcatcctccgtgtcaatcagcggaatgattgacacaggagtaaacagtaactgtcaaccatcagaaaaagaccttctgccggcagatcaaccacttgcaaaaggtctttataaaatgctgttatttattttgtctcaaggatcttatcaacacttgccagttttacactcaatacaaatacttcagcggcaactgcaagttcttccggtgttggataagacggtgcgatacggatattgctgtcatgtggatcttttccataagggaatgttgctcccgctcctgtcataacaacgccagcttctttcgccttcgcaacaatcgctttcgcacatccatccagcgcatcaaaggagatgaaatatcctccgcgtggcgcgatccatgatccaatctcaagtccgccaagttctctttcaagaacttcaagaacagtctcaaacttcggacgcaggatatctgcatgtttcttcatatgttctacaattccgtgaatatctccgaagaatcttacatgacgcagctgatttaccttatcatgtccgattgtctgcacacgcattgtgcttctgatatcctccaggttcgcatcagatgctgccattgctgcaattcctgatcccgggaaactgatcttagatgtagaagaaaacttgtaaaccatatccgggttacctgccttcttacactccatcagaatctcaatcagataatcctgtttatcttcatataaatgatgtacgcagtaagcattatcccagaagatacggaaatcttctgctgccggcttcaggttcgcaaaacggaacactgtctcatcagaatatgtgattccctgcgggttagagtacttcggtacacaccagattcctttgattgccggatcactgcttacaagtttctcaaccatatccatatccggtcctgttgatgtcatcggtacattgatcatctcaattccgaaatgctctgtaatcgcgaaatgtctgtcatatcccggaaccggacataagaattttaccttatcaagcttacaccatggagtacttcccatgataccatgtgtcattgcacgtgctaccgtatcatacatcacattcagacttgagtttccgaaaatgatcacgttatctttcggaacttccatcatatctgcaagaagctgttttgcttcatcaattccatcaagtccgccatagttacggcagtcaacaccatcttcacaagtcagatcaacaccacttgtcagtgtatccatcatccccattgacagattcagctggtctgctgacggttttcctctggacatatccagtttcagaccttttgccttcacttcttcaaactgcgcctccaggccactctttaattccaataactcttctttgctcaaatctttatatgcagtcattgcaggaatcctccactttctttattttttcacttttgttattgtatataatttttgacgtttcgtcaatgggttcttgcattcttttttatttttttgtttttttcagctttattttcacatgttttgcatttcaaaaatgtttttcattcattttccactatattccgtgttatcactctatcccatcaggttttatctatgcattattgattttttctcccctcctgtgatatccttagaaagtagattccagtcagcattccacttgactgtgaataaaaatcttatgattctatggaggtactaaaatgaattttacatttgcacacaataacctgaatgtatatgatcttgaaaaatcactggatttttaccagaaagctctgaatttaaaagtagaacgtgaaaaacttgccgatgacgaaagttttaagcttgtatatctcacagacggtgtgactccgcatcttttagagctcacctggctgcgtgatatggatcgaccatatgaactgggagataatgagatccatcttgcatttgctgtcgatgatttcgatgctgcttacaaaaaacataaagagatgggatgtatctgcttcgaaaatccatctatgggaatttattttattgaagatcctgacggatactggctggaaattgtaccaggcaaataaaaaaagtttaaaaaaaggaatcagcatcactgattccttttttggttctaatatcttacataatatgtaacacgtacagaacttaccttaaccggtactcctgtctgctgtgcttcgatcatctgtccgccgccaatgtaaattgctacatgtcccggtgtccaacagatatctcccggctgtggattatttacgattgttccatgcgcaagaatatctccacttgttcttggaattggaattccagcctgtctgtaacaatactgtacaagtcctgaacaatccagtccaactcccggtgtagttccgccccatacatatggaactccgatctgtgaatacgccgcatttacaatagtgcttcccttatcagcactataacttgggcttgatgaggaagaacttgagctgcctgagcttgaactgccggaagaactactgcttgagctaccggagcttgaactgcttgagcttgagctgcttgaacttcctgagtttgaactactggaagaactattgtttgagttatttctattagaagtactactgcttgagttgttcttcttagctgcttcctcggcagctttctttgctgcttcttctgctgcctttctcttagcttcttcttccgctgctttctttacagcttcatcaatcttaacatcgagatttgcgatttcactactcttctctgtgattgttgtattcagttcatccttctgcgcatcatactctgtctgtgtctcctgcagatcagccatctttgtctcaagcgttgtcttaagatcttctactttctgaactgtcgcaacatactcttcgagcttatctctgtcataagaatgtacctgctgggaatattctgcctgtgtcagtacactggaaatatctccggatgtcagtaccttctctactgtagcagttcctgttccttcttcatacatatacttaatacgaagcttcatagctgcatactgctgttcctgttcctcctgcgctgtcttcagatcttcctccgtctgagagatttcctcacctgtttcgatcaaatcattctcaagatcagagatcttggtcataagtgaattcagctgtgtctgaagatcgcttacctgattctgtgtctcctgcttcttctgcttcagatcactgacttcgtcggcaagtaccggtgtaacagtcattgtacatgcaagtgttactgcaagaatcatactgcttactttttttaacttcatctttccacctatccttatttttatctagtcccccatgtgattcattataattttcgtatcataactcgttgtaaatagttacattataattccacatactcatatgttataatacaacatctatcgctttttttcaacatatttctcgtaacaagagggtattttatttacattctatgctcaatattatagcgtatttatgtaatattttcaatactcctccttacttttttcattttttcgtaacatttttgtaacaaaaaatctggaaagttctctttattttttgataaactttccagattcctgtttcactgtatgatcttttattttctactgaatatataagtttgtatatcccatcaggctttcatctacttctcttgccacttcacggccttcacggatagcccatacaacaagagactgtcctctgtgcatatctccggctgtgaatacatctttcacattggtagaatattttcctgcctctgtctttacatttgtgcgttcattcacttctacaccaaatgcttttgttacataatcctgacttccaaggaatccagctgcgatcagaacaagatctgcatctacggtatactcgcttccttctaccggaaccatcattttccgtccggtcttctcatctgtcttactctcaagcttgataagaactgccttacagagattccctttcttatcttttacgaattctttcactgtcgttgtgtaaacgcgaggatcagaaccaaacacagcgattgcttcctgctggccataatctgtcttgcagactcttggccactccggccatgggttcagcggtgtcctctcgtccggtgctttcggcatcatctccagctggagaacgctctttgctccatgacggatagatgttccgacacagtcatttcctgtatctccgcctccgattacaattacattttttccttttgcagaaatgtagcctcctgttttaagcttcatgtcatttgcccatagtgctttcgttgttgatttcaggaaatctactgcaaaataaattccctgtgcatctcttcccggtgctttgatatctcttggatttgatgctccgcatgcaaggatcacacggtcatattctttcaggatatctgccgccttcacgtcttttccgacattacatcctgtctggaagataattccctcttcttccataatcgcaatcttacggtcgataatctgtttctccagcttcatattcggaattccgtagcggagcaatccacccggtttgtcctcacgttcaaaaacagttacctgatgacctcttctgttcagaagatctgctgccgcaagtccggacggaccggaaccgatcactgcgactttctttcccgtacgcactttcggcggatttgcctttgcatatcccatctcatatgcattttcaataattgcatattcattactttttgatgcaactgcttcctgattcagtccacaggtacatgcattttcacacagtgccggacatacacgggaagtaaattccggaaaattgtttgtctttttcagacgtaaataagcttccttccagtttccattgtagatcaagtcattccactccggcacaaggttgtgcagtggacatccactggccattcctgcaagcggctttccagactggcagaacggaactccgcacgccatacagcgcgcgccctgaagttcctgttcttctttgctaagaggcgtatggaactcattgaaatgtttgatgcgttccaatgggctctctgccggtttatcctgtctttcataatccataaatcctgtcggttttcccatctctatgcctcctatcttccgttcttgatcatattaaatgcttcgatttttgctttttctctgctaagtcctttttcttccatctggatgatcgtggacatcattctctcatagtcttccggaatgatcttcttgaattttggcagatattctttgaaattatcaagaatcttcttacctacctcagagtttgtataagcaacatgctcctggatcattccttttaattcctgtacatcatacttatctgtgacacgttcaatgttgaccattgctttatttactttacgatacaggctgttatcgagatctattacataggcaataccgccgctcattccggctgcaaagttctttccaacctgtccaagtacaacaacacatccacctgtcatatattcacatccgtgatctccgacaccttctacaactgcacgtgcaccagagtttcttaccgcaaaacgttctccggcaacacctcctacaaatgctttaccacttgtagctccgtaaagagcaacatttccgataataatgttctcatctgatttaaatttcacacctttcggctggcaaacaaccagttttccaccggaaagtccttttccaaaatagtcattactatctcctgtcagttccagtgtcagtcctcttgggataaatgctccaaagctctgaccgccggcacctttacactggatcacatagctgtcttcttccagtccttccggatatcttcttgtgatctcagatccgaaaattgttccgaaggtacggtctgtatttgtaacatctacttcaagtcctctcttttctcctctttcaagggctgggagaagctgtttcaatagtactttttcatccaacgtcttgttaagttcaaaatcatagactttctttggattaaagataacacctttcttctctttcgcatatggattgtacagaatctgtgacagatccagtgttgcggcacgctctgatgtcggaacgtcttttactttcagaagatctgtacgtcctaccagttcatccactgtgcggacaccaagttttgccatatattctcttaattcttctgcaataaaacgcataaagttaacaacatattccggttttccgctgaaacgttttctaagctccggattctgagttgcaacaccaaccggacaagtatccaggttgcagacacgcatcataacacatcccattgttacaagcggagctgtcgcaaatccaaactcttctgctccaaggattgctgcgatcgcaacatcacgaccactcatgagcttaccatctgtctcaatacggacacgctcacgcagaccattctgaatcaatgtctgatgagtttctgcaagtccaagttcccacggaagtcctgcattctgaatcgagcttctcggtgctgctcctgttcctccgtcatatcctgagatcaggataactccggctccggcttttgcaacacctgcagcaactgttccaacacctgcttctgataccagtttcacagaaattcttgcatttttatttgcatttttacagtcatagatcaactgtgcaagatcctcaatcgaatagatgtcatgatgtggcggtggtgagatcagactcacaccaggtgttgaatgacgagtcttcgcaatccatggatatacctttccacccggaagatgtcctccttctcctggttttgctccctgtgccatcttgatctggatttcctgtgcactgaccagatacctggatgtaactccgaatcggccggaagcaacctgcttgattgcagagcatctgtttgtgtcaagacgttcaatatcctctcctccttcaccggagtttgatttaccatgaagcatattcatggcgatcgccattgtctcatgtgcttcttttgaaatagagccataggacatcgcacctgtcttgaatcttgttacgattgaatctacgctttctacttcatcaagcggtacactcttcttcgggaaattgaaatcaagctgacctctcagattgatcttctcgccttcctcatcaaccatctctgtatactgcttgaacatttcataatcaccacgtcttgtggactgctgaagcatatggattgtctgtggattatagagatgttcttctccgccacttttatatttatgttttccaacactgtccagtgtcatatcaacctgcaatccaagcggatcgaatgcttctgtatggaaagcagtgtaatcttctgcaatttcttcaataccgataccaccaacacggctgactgtatctgtaaaatagcggttaataaaatctgtcttgagaccgattgcttcaaaaatctttgctccctgataggactggatcgttgaaattcccatcttggatgcaatcttaataattccatgaattaccgctgaattataatcatctactgctgcataataatctttgtgaagcagatttgcctcgatcagatgacggattgactcatgtgcaagatatggattgattgcacatgctccatatccaagcagtgttgcaaaatgatgaacctctctaggctctccactttccagaatcatcgcgactgaggttctcttctttgtacgtaccagatgctgctgcagtccagatactgccagaagtgacgggattgcaacgtgatattcatctacctcacggtctgtcagaatcaaaatattagcgccctcgcggatcacacggtcaacttcaatgaagagatactctatcgccttctcaagacttgtgtttttataataagtgattggaatctctgcaactttgaatccatccactttcatatttttaattttcagaagatctgtatttgtcaggatcgggttattgactctgagcatcttacagttctcttccttctgctccagaagattaccgtctgttccgacataaatagttgtagaagtcacgacttcctcacggattgcatcgatcggcggatttgtaacctgtgcaaacagctgtttaaaatatccgaacagtggctgacgtttctgcgaaagcacggaaatcggtgcatccattcccatcgctgcggttccttcggcaccgttctttgccattgtcagaatagaagttttcacgtcttcataagaataaccaaacgctttctgaagctgtgtacactcttcagctgtatattttggcacatccttattcgggattttcaaatccttcaactgaatcagattactgtccagccattctccatatgggaactgatttgcatatttttcttttaattcctcatcatcgatcacgcgtcctgcaaccgtatcaaccaaaagcatcttacccgggtgaagtctttctttcatcacaatcttggatggatcgatatccagaactccaacctctgaagaaagaatcagattatcatcatctgtaatgtaatatctggaagggcgaagtccgttacggtcaagcacagctcccataacatctccatctgagaacaggatagacgccggaccatcccatggctccatcattgttgcataatactgatagaaatctttcttgttctgggacatctctttattgttgatccatggttctggaatacagatcataactgcaagcggaagatccattccactcatcaccatgaattctaatgcattatcaagcatcgcggaatcagatccggaagtattgatcgcaggaagcaccttgtggagttcacctttcagacatcctgcctccattgtctcttcacgggcacgcatcttatctgcattaccacggatcgtattgatttctccgttgtggaccataaagcggttcggatgcgctctctgccagcttggtgcagtatttgtactgaatcttgaatgcaccattgcaattgcagaaataaattcttcgtcctgcagatcttcaaagaaaagtctcagctgtcctacaaggaacattcctttgtaaacgattgttctactggaaagtgaaacaacataagtgtcatcactgctctgttcgaaaattcttctgactacatacagtcgacgatcaaaatcaattcctctctcgtattttgcagggcgttcaataaatgcctgcataatacatggcatgcaatctaccgctgtctttccaagaatgtccggatgaatcggaacttctctccagcccaaaagtttcagtccttctttttttacaataacttcgaaaatctttttcgcctgattgcgttttaattcatcctgcggaagaaagaacatacctacgccgtaatctctttcatctttcagcttaattccaagtgggtgacagactttcttgaaaaatccatgaggaatctgtgtcagaatacccacgccatctcctgtctttccttctgcatcttttccggctctgtgctcaagttgttctacaatactcaaggctcctgccactgtactatgtgtctttttgcctttgatattgacaattgcaccaataccacagttatcatgttcaaaactttcgcggtaaagaccacgattctgactttccatttctttcctcatagtcgctatcctttcttcctgtaatctaaagtttactttaaaatcttctttattcggcgcattcaatcatttctttctcacgtcgtgtaaaactttttctagaatatacacccttttacccaggctgtaaatagggaaactcttgtgaattgtctgattatttgatttttcattgattttatttgaatagtcagattattttgatttccttataaaaataatattaattattaagatttctgtttttctttgattttatttgataaaataatagattaaaaagaaaaagcgcgacaaggtttcgcacctcatcgcgcacaattcaagattgtatttttatcagtacaatttatttcatttgtatttcttcattattcctctgttttctgagtactcaccggatccccgcttctctgaatccacacaaaacaagctgcacagataaatgtgctgataatcactgccgctgccattttaaacggttctctggcaagccagttaaacactccgatatctgtaaagatcaaagatcccagattcaaaacaatgtgaagcataatcggagctttcattgaaccaaatttctcataaacatagcacagaagaattcctaagagaaaagtgtagatcatctgtaccgtgttggtgtgtgtgactgagaaaaacagcgctgaccagattgccgcataataaaatcctctggtctcccgtaccctctgataaagcactccgcggaacataaattcctctgcaatcggaattgcaaatccaaatacaataatctggaccacaaaatctgctgaatacatattctgtgctgtctgaacatactccggatcgaccaaaacggcctgtgccataacggacagacatgtagcaccaatacttccgatcactcccatcacaagaagtgaccagtaattcttcagtggcttttgaactcccatccgctgtatccctgcaatctgctctttctttcgatcgataacaaacaacgtaactgtcagaaacaacgtcgctgctgtagcaatccctgcaatcgcaacctgacctcctatgattttatcaaacgcaggacttaatacttcatagtacttattcatcatttcctgataattaaggacttctccactttgtgtcatcctggaagatgcttcccccataaaaggaagaatgattataaactcaatcacaaattccatcaccagctggattccccagaatccaagtagaggaccggcagctctccagaaggagcgtctcggatcatttttcataagacaattcctccgctatcttctgaatccactctctgatctttcttgcttcaccttttacagttccctgaaccatctccggctttccgcctccccgtccttcgaatgcagcatttaacattttggaaaatgcacgaagatcctgggttctgcttccgatcacataacggtatcccgctacatcatttccataaaacacagcacaaagaattctttctttttcaagcacttcattcacatactgacgcatggcatccgcactgatatcctctgaaaacatacagaccgttttttcttcttccggaacagactgcgcccagacgtgtacaagctggcgttctttctccaccagtgtccgtttcaaagaatccagctcttctttcaaatgtcccactgcctctgctgtctcatattctttcgcacagagcaacgctgaaattttcctgttctgttcctgcttcttctcataatctgtaagtgcacggcttccacagagcattgtcacacgaacgccgcctttgtatcgctgcatattaacaagcttgatcataccaatctctcctgtgcgttcaacatgcggcgcacagcacgcacagatatcatatcccggaaccgatacgatacgaacctgtccctcaatctcaatcttactgcgataatccagttcttccagctcttctttggatggataagacacttcgattgtcagattcttccacactgcacgatttgcttcaagttcaatctcctgcagtgcttcttttgatatctctccatcaaaatccatcgtacaatcttctgttccaagatgaaatccgacattgttgaaaccgtatcttgcatgcacgattccggaaacaatatgctctccggtgtgctgctgcatcttcataaatctggtctcccagtcgatctcgccttcaacaatctctcctgcttcaaacggctgatctgtaatatgcagaattcttccattcttttcccgaacatcagataccttcgcatccttcagttttcctgtatctgcatactgtccgccgccttccggaaagaatgctgtacgttcaagttctaccgcatagcatccttcctttttctcatatggctcacattccagaaccattgcagtaaattttgaaagatggctgtcattgtaaaacagtttttctgttcttgtaccatccatcaatccattttctgtcataattcgtattacatcctttccggagctgtaaagccaagaaggtcgatgcaagtctcaagcacttttttcgcaagtgtaagaagtgcaagatagcctttcttcttctcttcgtcttcttctgcaagaatctttgtctcatgatagaacttattaaagtcgttcgcaagatcatagatatatgcacacaacttatgaggagctgtctctttatatacattatcgatcacttcattgaatttcactacctgaagcatcagagacttctctgcatcattctcagccggtctgatcgttccgtcaagaactccgccattctcagcatatttcttgagaatagacttaattctaacgattgtataaagaatatacggtcctgtatttccctcaaaggaagtaaatctgtcaacatcaaagatataatccttagaagcctggttagaaagatctccgtacttgatcgctgcaagtccaacttcttctgctgtacgtcttgcatcttcttcctctactgtacggttgtccatgatcttcttatacatctcatcatcaatctcacggatcagattctcaagacgcataacaccgccttctcttgtcttaaacggcttaccatcttttccgttcattgtaccaaatccaaggaatgtaagttctgtctccggttttacaattcctgtcttcttcgcacaacggaatacctgcacaaaatgcagttcctgacgcttatcaacaacatagattacttgatctggatcatacagtttctcacgttctaccagtgtagcaagatctgttgtatcatacagcgcagctccgtcagatttcagaatcatacacggaggaatctctttcttatctgtctcttctgcaacgtctactacaagcgcaccctcatcataatgtgcgaatcctttctccttgagcatctcaaccatatccggaatatatgcctgggcatctgcttcacctttccagagatcaaaatctacactcagtcgctcgtagttcttcttcaagtcagttacagacacattcatgatatgtttccagattgcacgatatcctttatatccattctgtaacagataagttgcatgaagtgcttcttctctataatcgtcgtgctcttttgcataagcacttgctgtaggataaatctcttccagttcactgatcgtaaatggtgcttcttcgggatattctccttcaaaactctcatcaaaatacgggagttccggtttacgttttttcaactctgtgatgatcaggcccatctgatatccccagtctcccagatggatatctcctgttacatcatttcctttaaaacggataatacgtttaatgctctctccgataatcgcagaacgaagatgtccgacatgcaacggttttgccacgttcggtccgccgtaatcaataataacttttttcggattcttttctttttcaacgccaagattctcatctgctgccatctcattcaaatactctgcaacaacttccggtgccagcttcaggttgataaatcccggattcaccgcttctgctgatgcaaaatacttgctatctgcaagttcttccacaactgcatttgcaatcatgatcggagccttcttatatttcttcgcacctgccattgcaccattacactgatattcacagagatccgggcggttggaaagcgtaactcttgcaagctcttcatcatatcctgctgctttgaacgcttctttcatttctattgtgatcatttccagtaatgtcttcaaagtttcacactcctctttacttttcgtttgtcttttctgcctgacggcaattttattaaaacaagtctgcctcccaacttttctggagacaaacagccactatttattctatcatgtatccaacagaacagcaagcgttactgtgcacagtaacggcaacgattcaaattgatctggactgcccccgaaaccaattgacataaaaataaccaatacttataatgtaaccacagctttacacatacagtttctacatcctgtatgatataacatcagacagaaaggatatccaacaatgttaaaattaggttcacacgttggcatgagtggaaaagaaatgcttcttggttctgcgaaagaagccgtttcttacggtgccaatacatttatgttttataccggagccccacagaatacccgccgaaaagaaatcagtgaattgaatatcgaaccagcatgggaatatatgaaagaacacggaattgatgaaattgtcgttcatgcaccttatatcatcaacctcggtaattcaataaaaccagaaacgttctctcttgccgtagaatttctggcaaaagaaatcgaccgcacgattgcctgcagaagccacactctgatccttcatccgggtgctcatgtaggtgccggtgtcgaaatcggaactgcacagatcatcaaaggactcaatgaagttctcactgctgagactgactgttgtattgcccttgaaacaatggccggaaagggatcagaaatcggacggaattttgaagaacttgcccggatttatgatggagttgtccagaatgataaattgagagtctgctttgacacttgtcatacaagcgacagcggatatgatatcatccatcattttgatgatgttatggagtcttttgaccgtctgcttggaaaagatcagattgccgtcttccatatcaatgacagcaaaaatattccaggagccgcgaaagaccggcatgaaaatatcggctttggagaaatcggttttgatgcaatttctacaattgtccatcacccggatttcgaatctgtaccgaagatccttgagactccttatattccttctgtaacaaaaacaaagaaatcttatgccccttataagtatgagattgaaatgctaagaaacaaccggtttgatcctgaaatgaaagaccacatccttgcagattgtgaataaaaaactatatgaaaaaagtcctgttattctcagccatctgaatgtgctgaaataacaggacttttttatcctatatatcctatagcgtctgagcggagtcgaaccgccgcacatgcctccggagggcatcgctctatccactgagctacagacgcatctcggttgttagtgggaaaatttaatttcgtacagctaacaaccttttttatcctagcacaattctgtataaatgtaaagtggcaaataagttactgttcacccccgtgtcaatcactccgctgattgacacggaggatgcgtgttttgatttgaatgcatctcgccccatcgccaaaggcgatttaaaatggcgagatgcgttgctggtcgcacatcgtgtgaacagtaacgcaaataaacctctaactttctgcggttaatcttttttcactgcaagcagaagaattaatatccctgccccaagacaaagtattgcccatgcacctgcctgttgtgaatctccggtctttgcagcctcttcccttatcgtttgttttggacataccctgacattccagttcattgcccctttgtcctcttcccattttggcagctggacaagaaccggctgaacctcgtattctgattcatcttcgacatagatcagataaactccttccctcagattcgtaagggttgcttttccatcgcaatccgtcctgcacaatccatcactataatgatatttactcaaagtccgcgccagctcttcctgttctctggcataccttacctcattgagatccacgcctttatcttcatatcttttctccatctcgtaagcaccatcaacaagagatgccactttggaatactggaatgtaacaccttctcttttaatttgttctccggtatctgcaatacagatttctatatttcctgtttctgtttctgcaaacgccggggtctttactgctaccaccagaaaacatatcaaaagaagaattccgcatttgattttcccattttgccgtcttttgcatctttcttttttgtctcctgcttttctttctcctgtagtgcttacatttccttttctggtttctgtttctttttctctttccctcacaatttcttttttctcgctttctttttattctttcaatcacaacatataccaaaaagagaattggaatcattgtgaagatcatttctctaacagatggacgtttctttttgattttctcttcttttttctcttcatacacaacccgctttccagtaatcactaaccgatgggtattaattccatatggggtacatgtgacaagcgaaaccagatcttctcccggtctgatttccagactttctacctcttctggtaagattacatttatttcttctaccttatatgcgagtttttctcccagtacttccagaaagaactcatcgccttcctttaattcatccagacgagtgaaaagtctcgcacttgcaagcccacgatgtcccgtcatcacacaatgcgtattttctccccctatcggaagactactgtccatcaaatgccctacaccttccttaagtactgcctcgctggttccatgataaaccggaagcctgagatctattgacggaatttccagtacacacatcattcctgtctgtattttttcggcatttaacagaccttcatactcttccatctggtcaggctcgctttgttccctgactcctttcgattctgcccaaagctttttattatattcatcagcctgattccttaattgttcaatttcatctcctgttgtctgttccacaatctgttcatatgttgccaacacattttgtgttttcttctgactataccagccagtcaaaagaggtatactacacaaaagaactcctatccatagtaaaagatctgactgtaatctattgtttttcctttgcattttttctgtttcttctcattgctcctgcaagaacaagaacacttccggttgtaatacagataacagctgctgaagaacctgttaccggcagtttttttctaactgtattaattactgttagattagcagatccttcgccttcatttgttgtcagactgatttctgattctttccagtttccgttaataaattctttgatctgcgcagatgtctccagttttttcaatcctttgtctgtttttccgtctccttttacatatgcgtttctatcatttggaaaacttgcttttatatttaacacaatcggctctgtcagcagacggtatcctgccggtgcctctgtttctttcagataataggtgccactatctaatccatagatcataaaggttccatcctgaccggatttcatctccaccgcattttccggctgctttccacctgtatggtcgtttcctccaagactgtcccggttaattacaatgtacccaccttctccctgttttacatatacttcattttttaatccagcgtcagaataaagtctgaacctggcattttccagactttgtccatggttatttgatttcaatgcattgattttataagtgaaacaaacaactgtatcccacggtgtatatcctgtacttcctctcaccgctgaatccggatcatttgaaaattccagccgaacatcattttcaaatcccggacgtcctgtatttttcgctgccttttcattcaatgttgcctgataggtaagcactattttctgtccatatttattttctcctgcttcatttttacgattaaactctctgtctatgatttttttcatatcagaaacaacaacctgaaacgtatctcctcctcccggagcttcctttacttcaaattcgtcttctttcaattcataataatttcctgcatttgaattttcataaatccggatggcaacagaatcctttttgaaagtaagtgcttcactcatcacatcatgccatgcgtaataataattgttatatccgttaacatcaggcatatttgactcataccgatatggcacagtctgcccgatctcaaaatcagccaagtcattccatccctgatttccaactttatcctgctcatcatcttcccggatcttttttgtcacaaccggatagtctgattttatgttgaggttcatttccggattagctgtacttaccatacacaaagaggcggctgaattcgttccttttactgctgtcacctcatcgataatataatatccgtatggtaatcccttaatttcaaatgaattgtccgcttttgtacttgtcacttcaacagattgacctgtttttccatttctctgtagatgggttcttaattcttctacaaaaacacgatattcactgtatgctccttccttttcctgagcggtctgcgccccttctgtctgatgcgtattcagagactgaatataatcgatcacatcatactctgttacatttctctcatccttatgaatccgctgtcccacgatataacagacaaatttcttgtattccggattaaacgtgtaattaatggattccattcctttcgcattttctgcctgaaataactgatataccaaaaatctttttcctttcagactctgtccgtcatttcctttgatcgtaatacttgcaggaccattattaagattcaaaattccatttgtagttgctgctcttccctgtacttcattttccgctgcatatacagatttgattccggtcgcacctattgttcccgaagtacagagtaccgctgccaaagtcatcatataacagattttcatcattctttttttcattttgtcatctcctcatttctcaccgttttactactatcttttttgctctttttttctgtaaatcattgccatgatccctactgctaaaattcctgtaagtaacacaggttttcctgccgatcctgtatctggaagcttctttcctgtctgatttataattttcattttcacattccactccttaattgaaccttcaatacttatcttgctgtctgcagtatctttgcttctgtattcttttccatttacaaccaacagacactttccctcttccggattactttccagacagatttcatattcaatatctgcatcatctgatgttttcggaattctgtaacctgtcggtgcttttgtttctttcatatagtactttttctttacttccagattttcgaacattgcaattccattcccatccgtcaacacccggtcaatttctttctgacatgcctggtcttcatataaagtaaactcagctcctgcaagtgcaacacctttttcattttcctttttcagctcaatcttgtaacaggctggcttatcttctatcgtcactaccgcaattccatcctctgtatattcgataataacctctccttcttctgtatttaccttagataaaaattctgttttcccgctctcatcaaccccgaaaatcagttcattattatttgtccgatacccgtccggtgcttttacttcttttaatttgtgcgttccctgagataatggcattactttcagactcccgttttcatccgttgtaagaatcttttcacttccatccggtctgatatgcttaaattgtgctcccgaaagaggatgtcctgtttccgttgcttttttcaccaaatgaatctggaaaacccggtccggtatcgtaggggtctgatatacatttattttttctcccgtaccttttggctttatctgacaaacaaaaacttcctcattcaggaaatacccttttggcggttttatctcctgaattgttacagtccccagcggaagtgcctctgttccgtctgtcgttttatacaatgcatcgcctttcaccttatacttctcctgataacggcaaactgcttttgcatctgtttgaaagacccagattctgactggctttttccctgcttttttcggatctttccccggctccagaagttctgcatagaatttcactaaaaactgtgctccctgatacgccgctgtccctgacggatcaacatactcctgttccataccttttttctttagcaaaagctctacaggattcatctgcggcgggtctgaaaatgtcactgtcgcttcctgtccggattttacggtaaccgttttcacttcatctacaagtgcataacctttgggagcttttagttcctttacgtaataagttccttcattcaacacaactgttgatgaatttcctgctgaatctgttctgaacgttcctgctcttgattcactagaaagagtgggactactatagataccgtactctgctccttccaaagaatagcaactgttcttttctgtcaccggagtattcgccgacaccttctttaatctccctgttccggtcggctggtatgttcctccccattcactaagcggctgtccatttccttcataaataaccccatatgcatccgggaaatatttataattctctttcgcccatgcaatccctttgtgataatactcagatttgtgtgttgaaatccaatgaccattcccacaggctacaccatttcctgtttctatgtggaccatatctccataccagtggtgtacttcattcatgatccaccatactgcgcattgttttaagagataatcgtaatttgaacttacaccgttgcatttattcttatcgtagtaatagaacattgccgcgatcatctgaatggtctgttcgttataacgtttggaagcatctactgctgttttgtttccctcttggaactttaatgttggattggtgcaatataggctttctcctgattttgtaccaagtcttccttcattccagtgctgcagcacagaccagtttgggtcatcatagtcaactacatcgatcgcaccgattcccctttcgatcgcctttgtataaacagtttctcctgccctttccgctgcatatacacctgtactttgtatcttattttcatctgtctggtcgaaagcttcttcctcgtcttcttcctgcttatcctcctgttcatcacaaaatcccaccccgatatctttcaggatcttttttacttcttctgcccagcgcagttcttcttcaatatcaacctccgttttttctccgaccttttcaggctgtttttcaagttcttcggccttgacaatgcctccgtatgtcattgcatagagaatacagattaaaaagactgacatgcagaggattgctataatctctccgcgtcctttcattcattttcctccctgtcgatacacatctctttccccagctgaagtttcccttcctgtgcataatagaaataagcatgattgcttaagatttcttcctccggaacctgcgtttcattgatttcccgcaccattctttctaattctgactgacggatctgagaagattccggtacgatgatcacttcatggacactgcttggaagaacatagaaattttcctttaagactcctgcaagcatgtccagaatataagggtatgcaatacaggccgccccataatttttcagtttattagacaaaacatacattttatctttttccggaagttccagttcttcatgaatatgccaggttcttcttaacagattctcccgatcatgttcccccggagttgatctgctgagcagttcatacactgcaaaattcattccgaaacattctgccggaagcagacgctttgtattttcttttgccgcattccaaagctgttcttttgtcaccttccattgtctcatatgcagatctttgatcagcatcactgccgtcccatcattgtccgcttctacaagtactgcaaacacaagtgacagatccaaaaactttttatgtggaacatccagaagtaattccttgtttttctctgtgttgatcagtcgaaagatgattctgtcttttaccccttcgaaagaaagcatcctctcgtaatcccatgatttttcctgtcggatttcttcatatagttccaccagatcttcaatgatccaatccatctgtttccctttttcatatagttcaaagaattcttccagatagattgtcggcgatatattaacccccggcgtctccaggattagtcctgtacgctctgttgcattattttttttcgtcgtatagacgtttaccctgacacctccatttaactcctgagtcagtttttcctttaccgcatttacaaattctgtataattcactcttctccttcctgattgcggttcataaaattaaaatgagaaaccagtacgaaatgtactatttcaattgagttagaatttcccggagagttcagaagctctccaaatagaatttcttaaaatttagaacaaatattatgtgttctttattatagacaggcctcccttaaaaagcaagccagaattttgcataaatccgaattgatttttttagtgaaaacagagaatttcatctgattttgtcaaagaaaaaaggaacctgcatgatacagattcctttttgaaatacagcttaaactgtactaaattcgtaattaaactcttgacagatactcgcctgtacgtgtatcgatcttaagaacatcacctgtctcaacaaacagcggtaccataacagtagctcctgtctcaacgattgcaggctttgtagctccctgagctgtgtcacccttgaatcccggttctgtctctgtgattgccagttctacgaacagcggcggctcaactgagaatacgttgcccttatgggaacagatcttaacgttctcattctcttttacaaatttcagagcgtctccaactacatcagcgttgagagcgatctgatcatatgtctctacatccatgaagttatacagatctccatcctgatacagatactgcatttcctttctctcgatgtgtgcattctcgaacttctctgtcggacggaatgtcttctctactacaccaccactgatgatgtttttcagttttgttcttacgaacgctgcacctttaccaggtttaacgtgctggaattccagaatctggaaaatatttccctcaatctcaattgttaaaccattcttaaaatctcctgctgaaaccatgtataatcctccttaattgcatttcgttcagacaatgtaactgttcgttacagactttttgcttctaccattctatactaatttgcgacttttttcaatctttttttgctcttcttatagaaatgaagcacaatcttctccaaataccgctttaaaacgatctgaatctcttcttttggattgatcggatgcactaaaatgttgtgtattccgaccctctttgcgccccatacatctgtaaaaagctgatcgccgacaaacagcgtgttcgcctgatctgttcccatgatctccatcgcatgaagataattctttcttgcaggcttcagcgcattataaatataatgtgtctggatctcctgattaaacatctctacgcgttttttctgattgttagacaacaaacaactttcaaagccaatctctctcagtctttgaaacagtctctttgcacgttcatctgccggtgcaccgtgaggaaccaatgtattatcaatatcaaagattaccccccggtatccttgctcatatagtttttcaaaagggatcttataagtcgatcccaaatattcatctggaaaaaatttttcaaacattatttcatctaactccgtaagctttgaaatcaattcttctatgatcccaagaattgatttcattataacaattcagtgaaatgatgtctactgtttttccaacgcatcctgtacatttctcctgaattctacccatgcgtcctcatcctctacaaaatatttcggacagatttttccggttacatcatagtgacggatcacctgatctgctgtcagatcatattttgcacaaagccatgctgtaagttgtacaagtgagcggtatgttgcatcagtaaactttccattctcatccggatgacaacattcaatcgaaatcgtatccacattgcgatcatttgaagcatatgccatctcccaggtcggaatacactgaataatctctccttccaatcctatcacaaaattactgcttgccgaagtctcatggctatctttgagaccattaaaataatctctgttatcctgcgctgtactccccggattcgctgtgtaatggacaacaatcccattcacatggtcaattgttgtccctggtctggaatacggatttacatctaacaactgtatatccatctccggctgcgtagcatccacatcagcatattgatttttcttttgtatacaggatttaaaaagaagaaaaagcagtaaaatcattaatgggatcattatgatccgcaacatttttctgcctcgctttttcttccttcgtgtattcttcggcaatgttttccgccctgccagctgctttcgtcttgacgtactcattcggtatttctcctgatttttaattctctcatttccatcgtttaaaacaaacatcttcttatttcagctattataccatatgtttcttaaccatttatgaattttgtcttaactgttttatattcgtataaaagggaaattcccggtagatccagctctcactgaacctccgggaattcctcaaggcgttcctatatattattttattatatcagggatgtgatttttcatcccgtcaggtaatgcggaatatccgcagtacttccatttatctgtctgcaggcaatctgcaaaccttcaatttactcgtctacactgtagttcggagcttcttttgtaatatgaatgtcatgtggatgactttctttcagtgatgccgcagagatcttcacaaatcttccgttctctttaagctcttcaactgtatgtgttccacaatatcccattcctgaacgaagtccacccatgagctggaatactgtatcttctacagatcccttataagctacacgtccttcgactccttccggaacaagtttctttgcattctcctggaaataacggtctttacttccgttctccatcgctgcgatggatcccattccacgatatactttatattttcttccctggtacagttcgaatgttcctgggctttcatcacatcctgcaaagatgcttcccatcatacatacattcgcacctgctgcgattgcctttgtcatatctcctgagtacttgataccaccatctgcaatgatcggaataccatactctttagcaacttcgtaacaatccataacagctgaaacctgaggtacaccaatacctgcaacgatacgtgttgtacagatagatccaggtccgataccaactttaactgcatctacaccagcttcgatcagtgctcttgcagcctctcctgtagccacatttccagcgatcacctgaagatccgggaatgcatccttaaccatcttcactgtgcggataacattcgctgaatgaccatgtgctgaatccataacaacaacatctacatgagatttcacaagtgcttctacacgctccagacagtttgctgtgataccaacagctgctccacagagaagtcttccctgctcatcctttgctgacaatggatacttgatctgtttctcaatatctttgatcgtgataagtcctttcagattaccttcatcatctacgatcggaagtttctcttttcttgctttggcaagaatcttttttgcttcctctaatgtaattccttcttttgctgtaacaagtccttcagaagtcatggattctttgatcttcttagagaaatctgtctcgaacttcaggtcacggtttgtgatgattccgacaagtttacgtccctctgtaatcggcacacctgaaatacggtattttgccatcaggtcattcgcatcttcaagtgtatgctccggtgaaaggaagaaaggatctgtaataacaccattctcagaacgttttaccttatcaacttcctctgcctgtgcttcaatagacatattcttatggatgattccgattccaccctggcgagccatagcgattgccattctatgttctgtaacagtatccattcctgcactcatcatcggaatattcaatacgattttctttgtcagatgtgttgacagatctacctgattcggaattacttctgaataagccggtacaagaagaacatcatcaaatgtaataccttcccctataatcttacccattatactttacctctctttcttaagaacccatgaaactgctttgaaatggcagttaatgtatctaaaaatcttttgtaattattaactgatatactacagaaattcccgaaggatgtcaagagtattttccctgatgtgctcataatttgtattgatttattttaacctttattattaagttttacttataagtactcctttatttattatctatgcgacaaactgagccttttttagaacaaacaaaaggttctatctgacattacgaaaatgtgatagaaccctctgttcctgctgctacagatctctatgtaacagctcttttattctattcttatagaaattctgcaaatcttcctgatggatagattacatcattcccattccacctgctccgcctgctggcatagccggtgtatcctctttaattgtagatacaacagactctgttgtaagaagtgtagaagcaacacttgttgcgttctgaagagcacttcttgtaaccttcgctggatcaaggattcccttctcaaccatatctacatatgtctcattgtaagcatcgaatcctgttcctacttcagactctcttactttgtttacaataactgctccctcaagtcctgcattctttgcgatctgagccagaggagcttccagtgctttcaggataatcttggcacctgtcttctcatctccctcaagagtctctgcaaattcttttaccttcttagaaacatggatgtatgcggatccaccaccaccgatgattccttcttcaactgctgctcttgtagcattcagagcatcttccatacgaagtttagcttctttcatctctgtctctgtagctgcacctacacggataacagcaactccgcctgcaagttttgcaagtctctcctgaagtttctctctgtcgaaatcagatgttgtctcttcgattgctttcttgatctgtccaacacgatctgcgattgcgttcttgtctccacatccgtcaacgataactgtattctctttctgaaccttaacagattttgcacgtccaagctgatccattgtagtttctttaaggtcgaatccgagttcttcagaaatcacctgtccgcctgtcagaattgcgatatcctgaagcatctcttttcttctgtcaccatatccaggtgcttttactgctacaacgttgaatgttccacgcagtttattcacgatcaaagttgtgagtgcctcaccctcgatatcttcagcgataataagaagtcttgctccagactgaacgatctgctcaagaaccggaagaatctcctggatattggaaatcttcttatctgtgatcagaatatatggatcatccagaactgcttccatcttctccatatctgttgccatatatgcggaaatgtatccacggtcaaactgcataccttctacaaggtcaagctctgtctgcattgtcttagactcttcgattgtgataactccgtcgttggatactttttccattgcatctgcaaccatctgtccgactttatcatctcctgaagaaactgcagcaactcttgcaatctgctcttttccgttaactttgctgctcatctcacggattgcttctacagctttatctgtagctttcttcattccttttctcaggacgatcgggtttgctcctgcttcaaggttcttcattccttcgtgaaccattgcctgtgcaagaactgtagctgttgttgtaccgtctccggcaacatcatttgtcttagctgcaacttctctgatcagctgtgcacccatgttctcaaatccgtcttccaactcaatctctttggcgattgtcacaccgtcatttgtgataagcggagcaccgaatgatttatcaagtactacgtttcttccttttggtcctaatgttactttaactgtatcagctaactgattcacacctctttcaagtgctgctcttgcttctgatccgtatttgatttcctttgccattttaactgcatctcctttatattcgtctaggtattactctacaattgcaagaatatcattctgctttacaatgatgtatttctctccttcaagctctacatctgttccggcatatttggaataaattactttatctccaaccttaacctgcattacaacttctttcccatctacaactccgccaggtccgactgcgattacttcagcttcctgtggcttctcttttgcctgtcccggtaatacgattccggactttgttgtctcttctgcttctaactgttttaaaacgatcttgtcacctaatggtactaatttcattgtaattcctccttactttattagcactcatttctctcgagtgctaacccatgaatataaaatagcactccccatttcatttgtcaacacagtttacatattttttataaaagaaaagctatggggctttctctgcctcacagctttttctttcgtctctaaaacttctctatgatcttctttcgttcatctcatagaatccgttctcaattttaaatttcagaagattcctgtcttcagactggtacctctctttcacaacaccggaacagcacaacagctctgtccccgttgaaatataacatctgtattttgcatccagcagaatcgttgtcagaggattttccatcacttcaagataaatgtaatcttcttctgtatcataatgatccaccttacaggctcttgttgtatcatcaaaaatagcatctgctgaaatcactttttccatctgcagatcaaccggatttccctcgtacatcttgtcttctccttctgcttacatccgttctttctcaatcctctcgagctctgtgaatacataatcattcagaactttaatataagttcctttcattcctgaagaacgtgattcaatgactcctgcactttcaaacttgcggagtgcattcacgataactgatcttgtaatccccacacgatctgccaccttgctggcaaccaagattccctctgtaccatcaagttctttaaagatatgaatgattgcttccagctctgagaaagaaagtgtgctgattgctgcctgaacaacatgttcttttcttgtctcttccgcactttcttcattcactgaacgaagcatctcaagtcctactacagcagtaccatattcactgagaataatatcatcaatagaatacgttgcatcctgtttgtagataaacaatgttccgagacgctccccggcaatatctattggtgtgatgattgcctgacatccttccacagcatctgaagaaaaaccaagtgtctccagattaacattctcttttgtagacagaacactcagcaatctttcattaagcatattatcaatatgagatcctacggattctgtgatcagttcactgatttctctcaccttattgcttttgctgactccaagaatctttcccttcttgctgactaccagcacatttgagtccaaaatctctgtcagtaccgcacagatatcattaaacacaactttgctggagttattattatgcagcaacttattaatctttctggtcttatccaataattgtacgctcattgtctcctccacatgatttgctcttatttactacttctagcaaacagtaactattatttcccaagttgtatacacaaatcaaatttcaaattccttactagcttatattatcatacaattcagaaaatagcaacgttgtgtttttctgttttttgaaatatttaatcttctttcttaattgtttccatatatccgcacttttcatcagcacaaactaatttattgcctttttctaccatgtatccaccacattccggacatttcttactggatggcttctgccaggacataaattcgcattccggattgtcctcacatccataatactttcttcccttttttgttttgcggataacaacttcttttccacacacaggacacggaactccgatcttttctagatatggttttgtatttctgcattccgggaatcccgggcatgcaaggaatttaccatgcggaccgtatttgatcaccatgttacgaccacactcttcacagattacatctgttacttcatcttcaatcttaacttcctcaagctctttttctgcaattttaacagcttcttcaagatccggatagaaattacggattacttccttccacggaacttttccttcttcaaccatatcaagaagaccttccatattcgctgtaaaatgaacatctacaatacttgggaatgactgtttcataatattattaacaacttcaccaatctctgtcagataaaggttcttgccttcttttgtaatatatcttcttccaaggatcagcgaaatggttggtgcataggtacttggacgtccgattccaagctcttccattgtctttacaagactcgcctccgtataatgtgccggtggctgcgtaaaatgctgttttggatcaaattcttcttttgtaagaacagaatccatgctaagatgtccgaccagtacattgctctcttccttctcttcctctgcctctacatacacagatcggaatccatcaaatgcaatccttgccgttgatacagtaaagcagtactcacctgctccaatcttaactgctgttgtctcatacttcgccggctgcatacggcttgctgtgaagcgcttccaaatcagctgatacaaacggaactgatctctgcttaatgaatccttgattgcggccggtgtacgtgtaatatctgtcggtcggatggcctcatgcgcatcctggatcttcttgtccgcggactttgcttttgttccttctgcaacatatgcttctccgtaagtctcagcaatatagcttcttgctgctgcatcagcttcctctgaaatacgtgtagaatctgtacgaagataagtgatcacaccaacggttccgtttcctttaatgtcaacaccttcatacagctgctgtgcaatacgcattgtcttctgtgtaccaaaattcaatgctttggcagcctcctgctgcagcgtacttgtcgtaaatggaagtggagctttacgcgtcctctcactgttcttgatatctgtaatctggaactcttcattctctaatttcttcaagatctcgtccatctcttcttttgaatgaatcgccatctttttcttctctgttccgtagaacttcgctgtcagaggacgtttctcaccttttactttcagttgtgcatccaatgaccagtactcttccggaataaatgcatcaatctctgcttccctgtctgcaacaatacgaagtgcgactgattgtacacgtccggcactcaacccacgctttacctttgcccaaagcaatggactgatcttatatccaaccatacgatcaagctctcttcttgcctgctgtgcatccacaagatccatgtcaatatcgcgtggtgctttcaaagatgctttcacggcattctttgtaatctcgttaaatgtaatacgacgcattttcttctcgtccagcttcaaggccgcagcaagatgccaggaaatagcctctccttcacggtcagggtcggttgcaagataaactttgtctgatttcttcgcctcttttctgagtgctgcaagaatctctccttttccacgaatagtaatatattttggttcgtagtcattctccacgtcaattccaagctgacttttcggcagatccctgacgtgtccctgtgacgctgcaactgtataattgctccctagaaactttttaatcgtcttcacctttgcaggagactccacgattacaagataatgtgccataaaaactatactcctattttattctgatataataattctttgttatttcacgaatgtatccctgcagttccagtgtaacaagaatgctcatcaattttctgatctccacccgagattcctgcgcaatctgatccacattcttaggatacaaaccgacacaactatacaccaaatcatctgtactttcaagcacttttttatttttctcgttttttatctccgtgtttctgcacaaaacatttgtttcaaccccccattcttccagcagattttcaggattcagaaggattccggctccctgttggatcagttggttacacccggcactcagagggctgtctaaagatcctggaagagcataaacatcctttccctgctccagtgccatatctgctgtaatcaaagagccactcctcaaccgggcctccatcacaagaaccgcatctgacagaccgctgatgatccggttcctcattggaaaattcattgcgagtggcggtgttcccggtggaaattccgaaaggattccacctccatgttctatgatatccatatataagccgatatgatcccttggataacagacgtcaactccactccctaaaacagcataagattttcctcctgcattcaacgctgctctttgtcctgttccatcgattcctttcgccatgccactgatgatatcaacacctgcggctgccagtgcttctgcaaattctcttgtatagtgttctccgtatccactacatccccttgctccgacaattgctgctctctttggtgctcccggacatgttcctttcacaaaaagagcatacggcggatctggtatctcagcaagccccggtgggtattcttttgaaaaaaatggaataaattcgattccatgttcctgcattttgcaaaactcttcttttaattgctctttcgttttctctttccgggctttttttaatccctctttttctttctctgtaaggaattcaattcctgcgatttcagtttcttctatataatatatcttctttccggttcctatgagttcacggagcagatacttttttcttgcagatagttttcggattgtggaaaaccaatattcaaaaatcatctcttcacacatcatacatacctcccccaatatttcttgtccaatgtccgataaccaattgcctcctgtaaatgttccagttttatctcctcactgtgatctaaatctgcaatcgttctcgcaacctttaagatacggtgataagacctcgccgtcagattcagtacatcataagcctgccccatcagccgcatttcttctccgtttaatctgcaatacttgctcaattctgcaccatgtagcattgcgttacactggatctttgtgtttttgtagcgaatcttctgtctctttctcgcttcacacacccgcgctttgatcactgccgaagactccggacaagaaacagactctttcaccagatctcgatattccactttagaagcttcaacactaagatcaatccggtcgagaaacggttggctgatcttgcttaaatacgcctggatctgtgccggcgtacaactacaggctgttgatgggaatttcccacaaggacacgtattcatggcagacacaagcataaaatcagccggaaatatataatttccactggttcttgtgatctgtatgctgcgttgttccagtggctgcctgagcacttcaagaacacttctcttaaattccggaagttcatccataaacaaaataccgctatgagccagactgatctctcctggtcttggaacaatccctcctccaatcagcgctgctctcgttgcagtatggtgtacctctcgaaaaggtcttctggaaatcaatggttcattgccatccagcattcccatgacactgtaaagctttgtaagctccatactttcttcgtaattcatcggcggtagaattcctgccatacattttgcggtcatcgtctttccgcttcctggtggtccgaccataagcagattatgccctcccgccacagcaatttccgctgcccgacggacattctcctgaccatacaaatctgcgaaatcaggtacttcttctccccgttttcctctgtcttctattttatcaggctctttttcaccaaaatgttctccaccggttctgtttccatgttccaaataactaatacattccctgagacttccaactgcaataatccgaattccttctacaagttctgcttccttttcattttctctcggaacaatacagcttgtaacttttcgtgcctttgcctctgacaccatagaaagtatcccaggaacctttcttacttgtccatccaatccgagttctccgatgatcatacagtctttcattcttctattctgttgcaaaacgccaagtgacgtcagaatcgccactgcgattggaagatcaaatgatgctcctcttttcctcatagttgctggtgaaagattgatcaccacacgtttcgccggaaattcaagacctgaattccggactgcagaccgtacgcgttctgctgcttctttcacctctgacgacagatatcccaccatgtgaaaaatcggaagtccattactgacatccgcctccacatagacaatttctaccgcaagcccttccattgctgcggattttactgtactaaaactcatatgcgctccttccttttcccagtcacaagcgcacctgttcttcttacaccccattataagctgctgaaattctggctgaatcagccggatttgattttcggaactgacattccgagaatgtatagatatcataacttccgaatatcgatttgtcaatcagtttccgagaacttgagcatatggaaaagcacaatttccacattttttcataaactatattaaatgcatccagaggtgctgtcttgaaagcatttcctaatcccctcacaccggcggaagagaaaaaatacattcagagatacaccgagggcgatctggaagccaagcatattttaattgaacgcaatctccgtctcgttgcccatgttatacggaaataccaaaatgccagtgaagatccggaagatctgatttccatcggcacgattggcctgatcaaagctgtaattacgttcgatcctgaaaagggaaatcgtctggctgcctatgcctcccgctgtgtagaaaatgaagtcctgatgtatctgcgcgccagaaaaaaatgcagccatgaaatctctctttatgaaccgatcggcacagatcgggaaggaaatgaagtcaacctctacgatatcatcgaatctacagaaacagatattccagagcggattcatctgaaggacaatattcaaaagctttatgaaaaactggaaaatgaactttctccaagagaaaaacttgtactgaaaatgcgatacggactgtatcagggagaagaatacacgcagcgggagattgccgcacaactgggcatctcccgctcctatgtatcccgtattgaaaaaagtgctatcggaaaactccgacaatatttttgaactttctaagactcttctatgaattaacttctttatcctcttcctgtcttctgagaagatcgtactgagctggtgtctcgctcagttctacatgaagaacctgctttgaatgcggtgcactttcctgttcctctccatcctcattcaagatccggagaacctttgcctcaacattacttccgtccggcttcatgatctcaattgtctcacctacagaaaacttattgcgctgttcaattcttgcaagcccattctcaacagccccgacaattccaagataagtatactcccggatatatgtgttattgtcataaatctgtgtctcatgatctggttttccaaagaaaaatccagtcgtaaactgacgataagtacagtttgaaatctgatccagataccaaggcatgttcttcttgtaaagctctggatctttctgataatcatcaattgctttacggtaagttctcgccactgttgcaacataaagtgctgttttcattcgtccttcgatcttaaaactgtcaattcccgcatcaatcaattccggaatatgctcgatcatacaaagatcttttgaattaaagatgtaagttccgcgttcattctcatagaccggcagatattctcccggtctcttttcctcgactactgcatacttccaacggcatggatgtgtacatgcaccctggtttgcgtcccttcctgtaaaataattactcagaaggcagcgtccggaataagagatacacattgctccatggacaaatgtctcaatttcaagatcttccggaattctttctctgatctccttaatctctttcagagacaattctcttgctgaaaccacacgacttgcaccctggcgataccaaaagttataagttgcatagtttgtgttattcgcctgtgtactgatatgacgctcaatctcaggacatacctcttttgcaatctcaaacacccccggatctgcaatgatcagtgcatcaggtttaatctctctcaactcttcaaaatattctcttaccccttcaagatcatcgttgtgggcaagaatatttgctgtaacatacacttttacatcatgtgcatgtgcgaattctattccctctttcatttcttccatagagaaattttttgctttcgcacgcaacccaaatgcttctcctccgatatatactgcatcagcaccgaaaattacagctgtttttaacacttccaggctgctcgccgggatcaatagttcgatcggtctactcatttttctactccttgttttatgctcactgccacaccatctccaagcggaataatagatgtgaccagatcctctctgtgtttcaattcatacagatattcccgcattctcgcatgtattgtacgatttctgcgttctaccgcaaaacgggattctatgatatccccatcctgcatcacattgtctgacacaagacagcctccatccgaaagcagtcgcaacacattcggaagataatgaatatattgccctttcgcggcatccataaagataaaatcaaaagttccttccatttccgcaagaacttctgtcgcatctccttcaatcagagtaatcttatcttcctttcccgctctgcggaaattctccctcgcaatcgggattctcttctcataattctctattgttgttatatgtccaccttccggcaggtaatcactcatcaataacgcagagaaacctacggcagttccgacttctagaacgcgcataggttttttcatcaaaaggagaacctccaggaagctctgcatctctcgtcggatgatcggtacatccgccgccagagcttcctgttcaattgtctccagtatttcactgttctctgtatccatagaattgatgaatgtaataatacgttcatctactatcatatcttacacatccacatccatgatgattgggatcaccattggtcttctctttgtcttcttccagatatagtcattcattgcatcacgaatcacaagcttgatcttattccagtctgtatgtcttcctttcaggcatttctcaagggcttctgaaacagcctttctcgcatcatccatcagctcctctgactctctgacatagacaaatcctcttgatacaatatcaggtcctgcaagcaggcggttcgttcttctctctaatgtaagaactacaataatgataccatcttctgcaagatgctgtctgtctcgaagaacaatatttccaacatctccaacaccaagtccgtctaccagaattgctcctgtatgaaccttatctacaactttagcgtagtcatcacacagttcaagcacttcgccggactgcataataaatacattctctttcggaattccaaggctcttcgcaacacctgcgtttgctttcagatgacggtattcaccatgcaccggaatcgcatatttcggttttacgagagaatagatcaacttcaattcttcctgacaggcatgtcctgatacatgggcatcctggaaaataacttctgctccctttgcagaaagttcattaatcacacgtgaaaccgatttctcatttccaggaatcgggtttgaactgaaaatgatcgtatcattcggctgaattgtaaccttgcggtgtacatcagctgccattctggacagcgcagccatagattctccctgacttcctgttgtgatcaaaaccatcttctccggtggataattcttcatctgatcaatctcaatcagtgtgttctccggtacattcagatatcctaattcagatgctgtagaaatgatattcaccatactacgaccttctacaacaacctttctgccatacttataagcagagttgatgatctgctgtacacggtcaacattcgaagcaaatgtcgcaatgatcagtcttgtattctgatgctctgcaaaaatgtgatcaaatgtgatacctactgtacgttctgactgcgtaaatccttttcgctctgcattcgtactgtcagacatcagtgccagcacgcctttcttaccgatctcagcaaaacgctgcaggtcgatcgcatctccaaataccggagtataatcaaccttgaagtctcctgtgtggacaacaacacctgccggtgaatagattgccagtgcggacgcatcctggatactgtggttcgtcttgataaattcaatccggaactttccaagattgattgactgaccgtgacgtacaacctttctcttcgttccacgaagcagattgtgctccttcagcttgttctcaatgattcccattgtaagcttggttgtataaatcggaatgttgatctctttgagcacatacggcaacgcaccgatatgatcctcatgcccatgcgtgataacaaatcctttcaccttggaaatattatctttcagataagttacatccggaattacaaggtcgattccaagcatatcatcttccgggaacgcaagaccacagtctacaacaacaatactgtcttcatactcaaaagcagtaatgttcataccgatctgttccaggcctccaagcggtatgatacgcaattttccattattctgttttttcaaaaaatatacacctccactatctctgtttcttcatacagtctttacacagtccgtagaatttcagttcgtggtccaggacatggaagccggttgccttctcgatatgatcttccaaactctccagaaggtcatcatcaaacggcatcaccttgttacatctcttacaaatcaggtgatgatgattgtgctttgtctccccattcagtaaatgtccgatctcatagcgcacacatccatccccaaaattaatcctgtctaccagctgcatatcccacaaaagctgcaatgttctgtatactgtggcaagcccaatctccggataatcctctgataccagatcatagatatcttccgctgtcatatgactcccactattctcttcaagtacggacagaacaagcagtctctggtgagtcaccttcagccccttttcctttaacttctctttcagaagcttctgtgtcttatctgcctccatctgtctgcctcctatctattgtaaaaagaactccagacttctttctgacacttctgcaaaagtgagaaaagtattcctgtctgcagtttctcttacattcgtatttctttcatgtaattacatctcaatatcgacgtcttccaacaattcctcaaatactttggaaactgccatcagttctgtatcgtcttccacgatctcatacgtcttctctgcgtcttttgattcttcaacttctctgagaatcaggcattccgcgtcgtcttcttctgaatcaactacaagaatatacgccgaaccattgatctttgtctcttcaagtacaaagaactcatctgctccacttccatcactgaaagtaaactttgccttttccatatgattttcctctattctgctgttttctgcatataaatcgaatctaaatatccctggagaataaacacagcagcaatcttatcgacatattgctttctgttttctcttctcacaccactctcgatcagtgtctgctctgccgctactgtcgtaagtctctcgtcccacatgatcacttccagtcctgtacgacgaaccagcatgtcacgaaattccaatgacttctgtgcacgctccccgatatcattattcatatgttttggaaatccaagcacgatcttctctacctgatattctttgatcaattcttcaatcctcgcacaggtacggcgcagcttgttctcctctttccgttgtattgtctcaatcccctgggccgtaagtccgagcgggtcgctgatagcaacacctacagtcttcgtcccatagtccagtcccattactctcattgtctgattattcccacgcattatgctcaatatacgctttcaacagttcttctaccagttcatcacgttccaccttcatgatcaggcttcttgctccgttaaagcttgtaatgtatgtcggatctcctgacatgatatatccaacgatctgattcaccggattgtatcctttttctttcagagccttgtatacgatctcaaaaatatccttcgcagaaatctgcggacccggctctacctgaaagaactgagtactgcttaaatcactcatctttcttcctccttctctttcttgtatctatttccttcttccgaagggctttgctgttgttctttcaaacagcgcaaaatgctctggaaacccagaaaccctacttacaattttaatataaccgaattcaaaattcaatgtataatttgcgaatctttcccaatttgaacttttacgatactattcttgagattttcatttatctctagtgcaattttcatatattctttcgtatgacctgtctgtacttcttttccattcagttcctgatcctcttccacaagcacttccacttcttttccctggaaactttgttcatatgctgtacgctttttctcaccaagttcaattaattgtgcacttctcttcgccttgatctgttcgtctacctgatccggcatcacagctgcttttgtcccctcacgccgggagtatttaaaaatatgtgtctcatagaaatctatgctgtctacaaaatcatatgactctttgaactcttcttctgtctctcccgggaatcccacaatcacatcggttgtcaatgccggattcgggaagtattttctgagaagttcacatttttccgcatattcgccacttgtatatctacggttcatacgctttaatgttgcatcacagccactctgcagagacagatggaaatgcggacacatcttcggaagctttgcaatcccttctgcaaattcttctgtgatgatccccggttccaaagagccaagacgaattctttcaattccatcaatctcatgaactgcccggatcaattccagaaggtgatattctttatcaaaatcaattccatatgagcttagatgaattcctgtcagtacaacctccttatatccgttatctgccagtgtgcgtacttcatcaagtacatcttccatggaacggctgcggactcttccacgggcatatggaatgatacaatatgtgcagaactgattacatccatcctgaactttaatataagctcttgtatgatctcccggcttcgtcaggtgaagattctcgtactcttttgtctttccgatctcttccatcttgatttctgcttttctgtcgttttcctggttctttgcattcttttcactttctgttacgttacaatctgcattgtgtgttctttcatactcttccaatgcttcgatcagattctgcttcttattattaccaagcacaatgtcaatgcaatcatccacctgaatctctttttccttcgcctggacataacatcctgcagcgacaacaactgcatccggattcatctttctcgcccggtgcagcatctgtctcgacttgcggtccgcgatatttgtaacagtacatgtattgattacataaaggtctgccccttccttgaaaggaacgatctcataccctgctttttcaagcatttcctgcatggcttccgtctcataggcatttactttgcatcccaaattgtgcagtgctgctttcttcatttatttctacctcttttttccttttatctcgttaatttcttgacttttgaacctgcatcccgtagaatatacctaggcttagaagccaactttattgtataattcaaggagggatttcaaatgaaaacagtacagatttcattaaactcaatcgacaaagtcaaatcattcgttaacactatcacaaaatatgataatgatttcgatttagtatccggaagatatgttatagatgccaaatcaatcatgggtattttcagccttgatctttccaaaccgatcgacctgaacatccacgctgacagcaatgttgatgatattcttgctgcacttgatgcttacatcatcaaataattctatctgaatacgattcatgcggactttatttttgtagcttgtccgcatattttttagagtaaagaaaagctgttccattggagcagcttttctttttcctattattctccctgcttcacttcaatgatctcaacagtatcaattgctgtctgcatcagttcgtcaatcttttctgcaaggttcaactcagacttctcaattcgttcaatattcggctttgtcaccggatgttttgcaacgaaaattgtacaacaatcctcaaatggcaggattgaagtttcataggtattgatcttctcagaaatttctacaatatccttcttatcaaatccgatcagcggacgataaaccggaagtgtacatactgcattcgtcgctgcaagactctgcattgtctggcttgctacctgaccgatactctctcctgtgatcagaccaaggcatccgtctttctttgcaaaatgttctgcgatcttcatcatgtagcgacgcataatgatcgtcagttcatcatgtggacacttctcatagatataaagctgaatatctgtaaagttgacaacatgaagcttgatcggtcctgaataagcagaaacgagtcttgcaagatcaaccaccttctcttttgctctttcacttgtgtacggtggtgcatggaaataagttgcctcgagttcaacaccacgcttggataccatatatccggcaaccggactgtcaattcctcctgacagaagcagcattgcgcttccgtttgtcccgattggcatacctcccggtcccggaatgattctggaatagatataaacttcttcacggatctccacattgatacgaagttccggcttatgaacatctactttcatttccggaaatgcctccaggattgcttctccgacttcacagttgatctccatagagttcgcaggatagctcttctttgctcttcttgcatcaactttaaatgtcatgttcttctcttcgtaagcttcatctacataagctacaacatcttttctcagctgtgccagctctgcaaccggcacacggactaccggacagattccaacaataccgaataccttctgaaggctttctactgtctcctcaaaatcataatctccatcacaatccacgtagactcttccgtgacatttgtgtacaaggaattctccgtccacgccctgcagagcataacgaatctgacgtaccagtgcatcttcaaagatataacggttctttcccttgattccgatctcgccgtattttatcagaaatgaatgaaatttcatgctttttctcctttatgaatcgacgtcaattaatgacgcgtatattttctcagcatcggtatacaattatatagtgtttccagcgtgtagtcaatttcttcttttgtagtaaattctgacatactgaaacgaatcgtcgcatccagatattcctgtgccgccccaatgcttctgagaacaccgcttaccgccggatgattcgatgcacatgcagatcctgatgagacataaatccccttatcttccagtgtatgaagaagaacctcacttcggattcctgcaattccaagactgatgatatgtggtgcacttccttcatctttcagaccatggactgttgtattctcaatctttcctgcctgctcaataaaataatccttcagttcacgcatcagagctactttcatatccagatcattatagatcatctttgttgcaagtccaagccctgcaattcccggaacattttctgtacccgaacggagatccttctgttgtcctcctccgaaaagaatcggtttaatcttcaccttttcgcccacatagaggaatccggttcacttcggtccatgaatcttatgtccactcgcacttaacaggtcgatcttctgacgttttggataaatgtgatattttccaaatccctgcactgcatccgaatggaaaagaatagaagaattatactcttttacaatctttaccgcttcatcaatcggttgaagtgttccaacttcattgttcacatacataactgatacgagaatcgtctccggacaaagtgcttctttcaatgcttccagattcactcttccactcgcatctaccggaagatatgtcacacggaacccttcctcttcttccagataacgcattgtatttaagattgcaggatgctcgattgaggttgtgatcaggtgatttcccgctcttctgtttgcccttgcacatccgatcagtgcgagattatcactctctgttcctcctgatgtaaagtaaatatctttcgcatttaccttaagaacctttgcgatcgtttccttggcttcctttacataatgctccgcatctacaccttttcggtgcatggaggatggattgccataatcctgacacattactttatatacaagatctcccacttccggatatgctctggttgtggctgaattatccaaatatgcttccattttatcttcccttttctaactctgttaccattcacaggcgtctgcaaccggcaacgtctttctattatcttatgtttttatcgtccaactgttcccggcattctaaatgatacatcagaattgacaatgttgtaagtcctgctgtctctgttcttaaaatacgttttccaagtgtgatcgggaccactccggcctctttcgcctgctcgatctcgctctcatcaaaaccgccttccggtccgataaagataccgacagactgtcccggttcaatcttacttatgacagcttctgttgctttcatcccttcttgcagttcataaggaacaagcactacatccagctctttcgcgtaattcatcgcttcctgaaagctcatcacatcctgcacttgtggcacaattcctcttttcgactgttccgcagcccccttggcgattgcctgccagcgttctctcttctttccggctttcttctgatccagctttacaaccgaacgctttgccgcaaacggaacaatactgtaagctccaagctctactgccttctgcacgatccattccatcttatcccctttcggaagtccctggaataagatcagacgggaagccagctctgtctgagacacttcttttttcacaacacgaaggactgcctctttctcttcataaccttccacactgcagaagtaatccattccctctccatcactgacccacacttcctcaccgggtttcatgcggagtacattcttcatatgattcacatcacttcctgccaaacggatctgttctccgtccacacaggatggatctgcaaaaaaatgctgcatcttgtttctccttatgcgttcttacgcgctgtcacacatacccattcgccctgatatgtaacatccaggagttccattccggctttcgcaacagcttctttcaccatctcttctttatcatcgataattccacttgtgatatagattccgcctggtttcagctggttcacgatcactggtgtgagttctacaagaaccggtgcaaggatattcgctgccacaatatcgtagcactcatatccaaccttatcctgaacttctttgtcatcgataatatttccgatcatcacttcatatttatctctggaaaccccgttgttctccatgttctcataagttgcatcgattgcacatggatcgagatctgttccaacagaatgctctgctccgaacttcaatgcaagcattccaagaattccgcttccgcatcccacgtcaagaatctttgtcgtctctgttgtatactttctgatctgacggatacaaagctgtgttgtctcatgcattcctgtaccaaatgctgtacctggatcaatatggatcaccatcttatcttcatccgaaggctttacatcttcccaggatggaataatcagaatatcatccacatagaactgatgaaaatacttcttccagttattcacccagtctacatcctctgtctgggattcttcaatctcgcaggctccgacatttacataagcagacatctcctccagttctttcttcacatttgccagaactttttctttgtcctcatcctcttccagataaaaacttaagtaagccacaccatcatctgcctcgatctccggtaaaatatcaacaaacatctgctctttatcagactctgtcagcgggatcttatcctcgatctcaacaccttcaatcccaagatctgccagcatactgcttacaatatcctctgcctctgttgttgtcttcaatctgaatttattccatttcatctagttttcctcctgaaaccacaaatctaaatctacgcttgcacgaattcccggaaccgtaccggcctcactgtactgccacatcttataatcatatggacactgcggaagttcatgataatccgcataccagaaatcatattctgtcagctcttccatcttcaaggtaaatgccatccatttcatattagcataaatcatcggttgatatccagcctgtttcactccgtcacaaaagactttacaaaaattcgtaaagtcttcccttgtattctggtctgttcttgctgtatcatctttgatttcttctgtgtcatagacaacaggtcctgtaatctgatacggctggatatgttccaaaacaaagtcagtctcttcgactgcctccgttgctgagattgcctgggaaaagaaatagacaccgacttccagaccggcatccaatgcgccttgtacattctgttcaaacatggcatcttcaactaacgcgccgctctctccatatgcacggtatccaagtcttacgatcacgaattcgattccgctttccttcacctgctgccagtcgattgtctctccctggaactccgaaacatcaattccttttttcgctgacacttttcccttcgtatctttatacgaaagatatcctgtctcttcatctaatgccagattgctaaaatcataagaattccttggtacttgttcctgaagccttgctctgtaattattttctttcacatcctggaagtcatagtacttctttccgtcttttgtaacaatctgaactccactgacaatctgcgtgttttcctgcttgtctttcttcgtctgtcttgtcttcacgttgccggaacccacgccgacaagaataactgcaagccccacaagaaccgccgccatccattgcttctttctcattcatttccttccaatcgcatctgttccgtaccgttgcagaaatgttgttactgttcacacgatgtgcgaccagcaacgcatctcgccattttaaatcgcctttggcgatggggcgagatgcattcaagccaaaacatgcatcctccgtgtcaatcagcaaagtgattgacacaggagtgaacagtaacgaaatgtttcccaggtaattttccttattcctctgctgcaagcacgatcatttcatctccggcttttattttaccaccatgaagcacttttgcaaataccccttctcgcggcatgatacattctcccattttctggaagatctgacaaccatgatgacattcttttccaatctgtgtcatctctaacaaaacatcgttacatcttaatcttgttccaaccggaagattgcggaaatcaatcccctgaacaatcacattttctccaaatgcgccatcttctacttctgcacctcttgcacggaatgcctcgatcttgtcataggaaagaagactgatctgacgatgccattttcctgcatgcgcatctccttccagaccaaaatcttcaataaatgtgccttcctcgattcttgtcttctgtgttccctttgccggactggtgcaaattgccattacttttcccatttttctatacctctcaaattactttttcacttttataatctgcactgttacttttctgttactgattttatgttactgttcacacgatgtgcgaccagcaacgcatctcgccattttaaatcgcctttggcgatggggcgagatgcattcaagtcaaaacacgcatcctccgtgtcaatcagcggagtgattgccacgggagtgaacagtcactgattttatttcattactgatctaaccaccgattccgtacatggcccgatgttcttttttctgcccaacttctttatctcttcgctcatcagagaaattgtgacaagccggtttttcccagattgcctgacgcattgcttctttcacttcttcatccgttgcaccgcttcttaaaagttttcttaaatcaattccactttcatactgtagacagagtttcagatatccttccgctgtgagccggatcctgttgcaggaatcgcaaaacttgtgactcactgcactgataaacccgattctgccctggaatcccgaaaagctcacatactctgccggaccattccccaaatgtttttcatacggttcagcgtttccaaatgctttctctaaaagttccagaagctcatctcttgattttccctgacaggcttttcccatcccgatcggcatcatttctataaaacgaacctctaccggatgctcctttgcatactctgccatctgaatatactcttcttctgactgattcatcggcacacaatttaacttcacacgcagattcggatattcgagtgctgcctgcagtccttccagtgcctgatttaattccccacatcttgtcactgtatggtaacacgtttcatccaatgtatcaatactgatattcactgcatccagcccctgacgcatcaactcgtccaactgatttttaagaagaattccgtttgttgtcaatgtcacctgttcgatccccgaaatcctcttaattttccccaataagtccggcaatccttttctcaccaacggttccccaccggtcagtttgatctttgaaatcccaagttctgtactgatccggcatactctctcaatctcatcaaaagttagaatctgctcatgcggcagctgctcaatgccctcttccggcatgcagtagacacagcgcagattgcaacgatccgtcacagagatgcgcagatattctattgttcttccatattgatcgatcatctcttacatacctcatattatttatctcttaccttactgttttactttccttcagaaactggttttccacactcacttgcatttcctgtaagaattgcaagaccatgttccagagatggaagtactgcttctagattctcttttacagccttcggacttcccggaaaattaatgatcaatgtctgattacggatcacagaagcgccacggctaagcatagctcttggtgtcacttgaagtgaagccagtctcatcgcctctgcgattcccggtgcattctttgtcgccacggcaaatgttgcttccggtgtgcagtcacgcggtgcaaaacctgttcctccggttgttgcgatcagatccacttttttctcatctgcaagttcacagagacactgttcgatcatcttctgctcgtccggaagaagccttacttctgtcacttcatatcctgcctcttctaacataccgcaaagaagcggtccacttttgtcctcccgctctcctgcatatcctttatcactcagtgtcactaccgctgctttccatctttgttctttcttttccactttacttttcgccttcttttctttccttcttatatccattgttgatcagcccactcttaccgccgctctttctgaccagatagatttccccaatctccatctttttatccatcgctttgcacatatcgtaaactgtcaaaagtgctacgcttgctcctgtcagagcttccatctcaacgcctgtcttcccggtcacacgtaccgtacaattacaataaattgcaagttcactctcaaccatctcgaactctaccttgcactttgtgatcggaagaatgtgacacatcggaatcagatccgatgtcctctttgctcccataatccctgctgttgtcgcaactccaagcacatcccctttgcctgcagttccttctttgacagcacggaacacttcttcattcaccgtgatctttcctgtggcggttgcttcccggactgtgtcctgcttctccgtcacatctaccataatggcttttcctttttcatcaaaatgtgtaaatcccatttttttcacctctcaatctgaaaatgctgttgttatccacattccccttgcaaatatcaaccagacgattactttttttataccaaacgattgtaccacagaatagtactaaaattcaatgttttggcaaaaagaaaggacaactagaatagctgcccttttaccatcatcccatctttttctttaattcttgtatcatttccaaagtttctttcgtgatttccgcaatctgttccagtggtagtcccgcttcaatcattgataaaataatttctttacgtccacggttttctcccgtcttgatcaatatatcacgatctctgattgctttctgtctcgcttcatattcaagacgttttttctcgtccgcacttaatttgtccaattctttatacgcttcttcaaaacaagaattcttcttagccattttctcaaaatcctccctgcgtttaccattcaaaaagcgcatccactgcattaaatctgtttcactcttttgttccggcggtaatttaggaagttccaaaatatgcatttccatcagatctgtatattcctttcccgtctttacatcacaaaacgaaatacgtcgataacactcatcatcttcttgaaataatacatgagcaagaatacttacttgaatacatttctgtaatctatcatagctatcaccttctcgtatctgttccgtatacatcttactcaaataataaattgtacgattcgcccaataatcataataaaccacctgcatctcaaaatcaatctgtacttcattatctaactgcacccgaacatctagaattccatacttatcatcttccgaatcctttcttaggattgtggggagaagctcagtatttacaatttcatctggacgcctgtttaatatagctgcaataattccttttctcacattttcattttgcatcaactctttaaagcaaaaatcaactgttggcaacataatgaaatcttctttttcatttaatgcattttcgcttttaattgcacttttagatacttttcttgggttttctttcataagaattctccttttcgtttttgtaagacaaacacttatatgaaggaaagaattctttatccaaatttattgtaacataggtttttttttcagaaaagcagaacttttaaacctgatcctttaataaactttcagttatcattcatacaatattcgtcttatgttttgttatcggattatttgttcgaatactgaactatggaaataattaccgattggttaatagatctctttgctgttcgtaagaataagaactgcgtgaatttaggctagcatatattttcgaaaattacaacctcttttcgattttccgtttaataaaaataaggacaactataatagctgcccttaaaatcgattattaaaattcaatattccgcatctcatctgacttctccggaatcttatgtctttccgcatatcctgtaagaatcagcgtaagtgctccgtccccggtcacattacaagctgttccaaaactatcctgaagtgcgaaaattgtaagcatcagtgctgttcccgcatcatcaaacagaaggactcctgtgataagtccgagggatgccataactgttcctcctggaactcccggtgcaccgattgcaaatactccaagaagtatacaaaacagaagcattgttggaattgacggaagttttccatacagaatctgtgagattgtcatacaaaagaacacttctgtgagtacagatccacacagatggatattggcaaacaacggaattccaaactgtaccatatcttttcttaatggtttcgcctttcctgcacactgcagagcaactccaagtgttgctgcggaagacattgttccaacggctgtcagatatgccggtccgtaatgcttcacaacctccagtggattctttcctgaataagcaccggcgattgtataaagaagtgccatccagatataatgtccgatcataacaataatgataaccttaaggaataccggaagctgttttgtgatggatccttcatatgccagagaacaaaatgtgaatccaataaataacggaaggattggaatcaaaatccttgacacgatggaaagcacgatcttctggaattcttccaacattcctgtgattaattttgccttattccatgccgctgcaagtccgatcataatagaaaatacaagtgcactcataaccggcatgatctgtgggatagaaagttcaaacatcatctccggcagttctttcagtccatctacatctgtcacaatagaaagatgcgggatcagcgcatatcctgctgctgtagagaataacgcagccccaacagaagatacatatgcaatacatactgcaagcagaagtaatctcgatgcattatttcccatctttgtaatggacggtgcgataaatccaatgatgatcagcggaacgcagaatgaaataatctgtcccagaacatatttcaaagttacaataatgttcagaattgcatttgtcaaacctgtcccgtcatttgcattaagagcaagtccggcaagaattccgatcacaacacctaccagaagtttaaatggcaggcttttgaaaaaactagattttttcataggaagaatcctccaatactatttttcggtcctaattcacagatgtctgtaatccccaacctttctcagacctgtttagtcggtatgcaatattataatacacgaaggataaatctacaactgtctgtttgtagcttaccgatttgcacctataggacttttatattttattgtcctgcagggcagaagaatactataagtccatgcgcttttttgtcttgtttgtaatttctcgaaaaacaaatcctgaggttagtgtgcagaccatagctgattattttgctactcagctatacggatgtaagttttgctttgaaaaattcaaatttgtataactaaaatctcaactttccttattttatgcgacttggcggtatgccttgccactctatatgtatccttttcccttgtttttgcccttatgaggtatctacaagggaaagtttttcttattcgattttattctccaaccaccttatcaagtagtcgggctgagtttcgcttaccttctcggttagcgtgtgcatagacattcatagtggtacttacatccgagtgtccaagtaattcctgtacatcctttggtgctgctccatttgagagcaggtttgtggtataagtgtgtcgcagggtgtggaagtggaaattatcatcaagctccgacaatcgtttccttgctgtccttaaagctgtctcaaccgttgcaggggcttcgtatgctccgtccggtctgatacatacaaggttaatctcgttgtaatcaagcggaatgtcctctgtgccatccaaatgataaagctcatagtagatacgattcttttccttaacttccctgtagtagttcctctgatagagttctccgtaactgaatacctgctttctctgttcctttttcgctttctttaagatgtcagcgagcgtatcacagaaatccacgatacggactttctttcgctttgtcggaccaatctcggtcttgtgccttgctccgttgtaacggacacttcttcgtactgtcagatactgttcctcaaagttaatgtcactccaagacagtccgcatacctctccaagtctaagacctgtgtagtacgctatctgtaccggcaggacagcaggcttgtttctttcttccagatactccataagcgtttgatactgctctggtgtaatcgggttgataacctctgcatcctcatcattatcagaaaacaaatccacatcttcctcggctttcctacgcattaccacatactgcattggattgaatgtgatgtactgctttggaaagactgcaaatcggaaggactgttgcaggactgcgtggaaagaacggatatagtcgatggtgtaaccctttgacttaaaatttccttcctcaccgccaaatgcaagtaaatccataaacttctgcaaatgctccgaagtgactgtctttagttttctgtttccgattgggtgttgtttaatcctgtttactgcctgtaaatagttaccgactgtaccgttgctaagtgaacccgttttcaaatcttcctctgcccatacatctagcatctgtccgagtgtgaggttgtccgctttggctagaaatttctttgcgtcataatcctccatagccttgcgtaacattttctctgtctctgatttgctctccgtacctgcaaattctttctgaaccaagttaccacttgcatcctccacataaaagcggtagtaccatttcttgcctttcttccttacagaaccttttgccataatcgtttctcctttcgatatcggcaatcggaactggtgaaatgcttcttgcgtgtaagtatatcatagctccgtctgcctatctataccgaatcgggatctttttctgataaaagattggctagtcgatttttcgctgtctcaggattcttagaatacagtcttacaatatcgcccatatcgttcaatgcgttgacggtgtgggtgatttctctaaggaacataatctcattgtattccttattggattcaaaccccattgtctgggcgagcattttgttatctgtatttcctttgaaattcttacaagcgaactggaacgaatccacgaacagctcgtattcccgtaacatcagtagtagcaggtctttggaaaaatcactttcggactgttccatatcataagggagcttattcagaatggaagtcatcacatcacgaatctgtaattctcttttatccgtaatgtctgtttcgtattcgtccgtctcacctttcagccattccacagatacatgaagtgcatctgccagaccttctaaggtcattttcttggtgttatcaatcgttcctgcttcgtatctctgaatggttgaggctgtcacgcccattttttcagcgacataaggctggttcaatcctaactcctgtctacggctttttgctctgctaccgattgtctttcgcaattctttatcttttaacatacttgcgaacctcctttttcggtatgtcattactataccacataacacgatatattgcaatacgcaattctataaaagatgatagaatttcgtaaggcttgacatagcgttataaaagatatatactttaatcagaattgcgtaacgcaagttttaaaaaaggctaatcctttcttcaaaaaggaacatcctctgatatacaagacttgtaatcctacgcaggaatgaggtgatcgaatgacagaattaaagtttgctctctccattgaagaagctgccgactatacaggtatcggaagaaacactcttagaaatcttgtggaatgggaaaagctgcctatccttagagtgggaagaaaaatcttaatccgcagggaacgattagacgagtttctgattctcaatgaggggaaggatttacgagacagacacgcagtaaaagcggtcaagggaacaatgaaaaatgaataagggacagtcctaagaccatccctctggtatgtatctgactaaaagccatgatatacctacacgcaaatagattatatcacggacaagtcctcagatacaaccagaacttttggaaaatgaggacaagatggatgtgaatgggtgcaatcgtccacccagttatagcttgttggtaggacaagtccacccaagatgcaaaaggtgttatgaatagtccacccaagccagaaaatgaagtgggtgcaaccatccacccaagtgaagccgactggtaggacaagtccacccaacttacaaaaagtgctgtgagaagtcataccaagtgtagctatgaaaaaagctgtccgacctatgacaaaaagtgtacgctactatgattttgagtgtccaatctatggggtacattttcaaagagttaatagtaaaaagctctattaaaatcaaaatgtaataaaacaatgcactattaaaaatgaaatttaataggaactttgtaagcgtccaataagagggtgtatcgaaatttctggctgttgcatgtaaactattgattagagttttgggagttgactctgaaaactctaaatctaatctaaggagcaggcttatggatctttcttctttgactccagacaaacaggtgaaacttcaatactggctggatgtaatacggcaatgcagggcctccggactgacaaatcagatctggtgtgaacaacacgatatctctttgaaaagttattattactggctttccaaaattcgaaagcttgccctggaagaactgccccgcaagaaaaacggcatccacatgtgtacagaccaacattcaactgctttaacggaatccccggctgagtttgcggagctttcacttccggacagaaacatttcccgttccactcctgcagccatacttcatatcggatccataacagtggaactttatgaaggcacatctgcccagatgctggaaaacattctgaaagccgtgcagtcatgttaggagatctttcccatgtggagaaaatctatatccgatgcggctacaccgatatgaggaagcagctcaatggcttgctggatatcatccagtacaacttcaaactggatccttacagcaattccttattcctgttctgtggaaagagggctgaccggatcaaagcagtccattacgagggagacggtttctgccttttatacaaacggtacgaaaacggacgtctccaatggccgcggaccggcgaagaagcaaaacagatttctgatcagcagctgcgctggcttctggaaggtttgaacccggagcagccaaaggcggttcagaaatggctcccgcataagtctgaaaatactgaaaatccttagaaatgctgggaaatctgacgattctatggtataataatcctatcgaagcgaaagggttttcatgttatgtcagctacggaacaggagtataaaaatcatatcaaagaactggaacagcaggtccggctcctgaaagagcaggttgatttcctgacccgtaaactttatggaacaaaatccgagaagacatctactctcgaaatcgaggggcagatgtctctttttaatgaaatcgaaacctgtgcggatcctgatgcacacgaaccggagcttgttgagatagagaagcacctacgtaaaaggaagtacaccggtcagcgggaagaactggtaaaaaatctccctcacagcaaagtactccataccatagatgaaagggaacagatatgcgataactgcgggagtacgatggtgaaagtaggggaagaattcgtccgcacggaagtacagtttatccctgcaaaactcaaggtgattgaccattaccgggaaacgtatgaatgcaggtcatgccggaaaaacggaactccttatatggagaaggctccggtgccatatcctcccgtcctgcattctctggcatctgcatctaccatcacctggctcatccaccagaagtttgaattaagcatcccgctgtacagacaggaaaaagaatgggaggctttgggattacgtttaagcagagcgactatgtcaaactggcttctggttgtctatcgggactggcttgtacacatcgtccaccgtctgaagctggaacttctgaaacagagataccttccatatcgatgaaacacatgtacaggtgctgaaagaaccgggacggaaaaatacgtccgattcctatatgtgggtttactgcagcatcagagatgccgtaaatcccatccgctacttcgagtaccagccgggacgaagcgggaaatatccggaagcgtttctgagggaatatgaaggttatatccatacagacgcttactccggatacaatgcagtttcaggagtaaaaagatgtctttgctatacgcatctgcgccgggctttcgtggatgctctcccaaaagacatccataattcggaagcatcaaaacctgcggaagcaatcctccgtctgaatcaactctttaacatagagtcagagttggaggcgttccctcctgatcagaagaaaaaagaacgtcttatccgcgagaaacctcttctcgaggctttttggtcatgggcagaaaaaagtgccatcggagagctgccgaaatccaaactttcaaaagcttttcattacgccttaaataaccgtgaagcgtttttggaattatctggaagacgggaattgttccatcagtaattcgcttgcggaaaactgtatccgtccctttgtgatcggcagaaagaactggctattctccggcagtccgaaaggggcggaagccagtgcaggaatctatacattggtagagacagcgaaagcgaatgggcttgccccgatgaaatatataaaatatatcctgtccgacatgccggggagtgcttttcttgaacatcctgaatatctggatgattatctgccttggaatcctcttgtaaaagaattctgtcgataaccgttgaccttttagtataaaaggctgacggttatttttctatacactgttttatttgacgcttacggaacttttactaccacttccttgccagacacagtttaaaagtaagcgaagtaacacaatgctattgtcagggcaaaaatgctaacgaatcgtgctattgttttttcgattttaatagcagacttctactgtttctacggtttttgctaaaaagtctgaataatagaacaatgctattgttaaggcaaaagtgctaacggattcgtctattgtttcgctgattttcatagcaatcttctagcatttctgttaagaaaagggagtgccggatacggcacataaaaagtgtgccattaaaggcacaaaattaggtgctgagggaacagttacagctaaaagtgaacttcataagcaagccctcggcgtttgagagcgaaatacacccatcgcacaaaacttcgttttgtactctgtgtatttcgctctgcgaggcttagccgccacaaggcggatgtgttcgcaagacgagtgcctatgcactcgctcacagggaaagtttactactcacatctcatctatcttatctgtcctcttttccaaaatcaaaactgggaaaggaggaaatcgctatgccaagaaattcatttgtgcagatgtcaaagctccataatgttcgtggaagaatctattatatctccagtgacaaaaaacaggaaaatctctatgcggtatatgaaaccacagaccgaaaattttggacagaacttgccaagtgcaatcaggcagaatttaagaaaagcggtacagagggaaaatgtatcgaagcaagagaatttatcattgccctgccggaatcctttgtggattatccgccagacggactattaaaatatatgacggataaattcaaaagtcggtatggtgttgattgtattgcagcactccatcataacaaacgaaagacgaattatcatatccatcttatctttgcagaacgaaattatcttgacgaaccgatagaaaagattgccaccagaaatatgttctatgatgagaaaggtaatcatgttcgtaccaagaaagaaatcctagacgagaatggaactatccgtaaaaggtgtaaggtgatcaagaaaggtgaggtctacgaaagacagatgtttaccatcaaggacgctcgctttaagcaggaacatttcttagatgaggtcaaggtattttataccgatgtcatcaacggacttgtcaaagatgagaaagaaaagctgtctgcattcaagcgtggggatgtctatcttgccactaagaaaatcggtaagaacaatccaaaggcagataagattacactcaataataaggtcatacaggactggaatcgtactgtggatcacgctttggtatcggggatggagcgaaaggaaatcttaaaggtaaagcaggaacagatttcaactccgattaaggaatccattcacaagtatggcaatcatccggagcttttgtttatgattatctttcgggcaatcgagctgttaaaagaactcataaagttgctgatacagaaacaggaacaacagaaagccagaatctccgaccttatggagcgaagaaatgaaaaacaagagaaacaaccagctccatccgttacacagacagacaatcagacaattcctgctgtgacccaaccattcaaagcacctgctactactaccgcagaaaagaccgttattccgccaagaccaagaatgtctgagctggcacacgattatgagatgcgacttgaagagattatggagaaacttaaacgacaaaacagagccattcatacgcaggaagtgaaaaaagaccttattgacgaggatttgaagaactgtacaggattattccaaggaaagaaacgaaaggaattgcaggcacagtctaacaaatacgcagaaacgattaagattatgaagcagggattatcccatatcgtgcaggattacaaatatccaacggtagatgcgttcctgcaagtctataaacaaggcaagtccgagtatgaatcctatgtcaaagcaaacaaggaatggaactccaagtatggagaaaactcaatccatcgaaagctggcagaaaaacaggcagaagttcagaaacgggaacaggacagagattttaactatcgttcgccatcagacagaggagctagataatctaattaaattcaaaaaagataaagaccatcaaattctttatcttttttgaatatttatgaaaagtcatcctgctatttaaagtgtctcattagatttttaattgtttcgactatcataagaatgattacgcagaaaaaggaataaaacaatgtggtattcatcttcgtgtttccaattttataaaacagcagaaatccaatgctaacaattatcacagaaataagtttatgtatccatttttgtttggtggttaaacatattttatggttacttataggtgcaaataatatacacataaggacaagtatcaaatatcctagtacagttggctttaaatagattatagcccacttatcaagacaaccgagaaaaaagctgcctaagatacatgttaactgcgttggagcatgggcacctccggtataatgtcgtaacaatgaaaaggtaattacccaaattagggtatagccgagtgtatgtgataaaactccccatacgaacaataacactatggttataaaagtattcaaaaaacattctaagccatatatgtatatttctaattgatccgcagaaacatcctccccggatagttctgctaacttattagcaatagatgtagcccacttcgtaatcattcaaaatccccgcttgtatcaaatcttgttgtatatttggcaaaagcacttatcacgtctttggaataagaacgtgcgatttgtgtagttagatgatttgacaattcaatcgttcctgatgtaatacgatagatatgtgccatatttacaatataagaacgatgggttcggataaattcacttggcaaatggacaataatcttatttagggtagacatttgttcatagcatttgccgtctacggtcaatatatccacataatgtaatctgctcgaaaatgtcaatatatctgcatagggaatacttacaatttcctgcttgtttcagtatatgtaggtattattagataactccttcgcgatttcatccaaacacagaaaaagagtattttccttgacgggttttagcaagtagtttaaagctctgacttcatatcctcggaatacatattctctaaaagctgttaaaaatacaataataccttgataaccagattcacgaaggcgtttagcaacctcaattccattcatttgccccatttgtatgtcaaggaaaaatgctgaagcctgtatagttgtgccttcagaattttttgaaaaatattcttcgcccgattcgtattcgtcaatttcaatatcccaatcatattgctgcccgtattttcttattccatttttcagccgttctgattcgatcacagaatcttcaagtatggttattttcattttcatagtagtttgttattctccttatccggtatcataatatgtacggaaaaaattttgttatcagatgtaatctgcaatacgccatctgccttttctacaagctcttttactcgtcttatcccaagtccatgttcttttccttgtttaacactcaaaatgtctccatcaatgctaccttttatcacaccatcataattattttcaatgtgaatcagtatcatattctggtaaggtttaatataaaaataaatgtatggatgctcggttggatcagagattataagtctttctcctgcttcaatggaattattccatatatttccaagtatggatgaaagctcaacagaatcaagcggaaaattttcaggagccataatagaatattctgtcttaattccgtgtttttcagcataatcaagttttgcggtaagtatgcagtcaatagcaatatttcccgttgctatggcactttgcgtagttgcaagagtgttatggtattgctctgtatatgctataagttcatcccatttcttgtcttttgctaatacgttgattgcatccacataaatctgcatatcatgtttcatttttcgtaatcgttcagttgtctcagataagatattgaactcagtcctttccagctcataaatcttttgttcttccagtaatcgtatgttttcttcttttgaataacctagctggtatatgtatagcatcaatactaaaaataaaataataaaaaacaagtcaaccaatgatagcctagctgaaaaggatgaatcaccaaatttatcaacagattccaaagtcagccttaatatgtagtgcccgattgcaagtccagaaattgcgatgaaaatatatgcaactttttggaacggtgaaagagatatgtctttgtttccaatagaatgaaataacaagacaaaaacagctatcattgccaaatataacatggtatatggcttccgtaatgttccacctaataatagctccagagacgctcctttataaagagtaacgggaataaagaacgaaatctgttctgcaactaagcaaatgatggaatacgaaaagccccaaaagatacggcgaattatactatcacgatagaacaatactgcatatccaatgtccaaaacacaagatgacatcaaagtgctgtaggatgatattcccattttattcagcgtgcataacacagcaaactgaaatgatacgaaaagaaacatcaaaactgcttgatgtttataatttgctcgaatacgcaattttttatggataaatattataaacaatgccagttctaagaaattaacaatatattcccatattgagtcaatatatagcatagccaccacttcctttaatcattctccgtcatattttatcatcaataaagtaggtacacaacataatatgctaccgtttgtgcatagtgagctaccattcatgcatagaggtattgaaaagtataaagattttgttatattcaaggtatactactacatcttaagtattctgagaatctataatatggagtggagatgataagatgtcgtactttaggaatattaacaggatatataatgtgtactagtatgtgttgcgtttcaattttcataaagataacctttaagaataattgaagataaccgttgttacatgattgaaaaggagtgaatgagtatgcattttaaaaaatctgttttaaaaaatcatttattgtatagcattataactttaatggctatagcaatgctatttcctattacggcatttgcacaagcttatgtacaaacatgggatcttgttgattctggcaaacatctagactatgacggaaacagcacttacatgagttatattaacactggggctgccacatggaatgcatataaatctggagtaatcagaaaagacagtgcttttgttgtagaagatgtatacgtaagcgatgtcaatgcttcgaatggatgggcaggcatgacatattctagtggtaaaattgaactcaatacctattatatgagcggttatagtaatagtaaaaaacagaatgtagcgacacatgaattgggacatgcattagggttggatcacagtacttcaacagatgttatggatgcagcaattacgggacatactagtacgcaggcattatctcaaaatgataaagattcatatgatgccgcatataataattattaggggagggagaacgctatgaaaaaatcaagtatctatggtattttgtctattgttcttatcgtaggaatgttttttacaggatgtgcatccaaaaataatgcaagtcaactgaatacaaatgtatctaacttgccaatccaccagatgcacgcatcttttgtatatgatactgataacattcgcgaagctgttggtatctgtgattacgtatttgtagcaaaggttgtcagttgcgatggaaccgagtatcgaaatgttataacgactgaagatgaaaaaggaaatcctaaggaggtcggttcgccttacactaattatactattcaggttctcgaaaatataaaaggtgaacttattacagataaacctattcctattgttaaacaaggcggaatttcagaaaaacaagatgctatttatctgtttgagaatgattcactgccttccgaaaattccatttatatctttttggcatatgcacaagaggatggttcgttactaatttctggtccaaattcaaatgtaatgtgtaacgattcgaatatgtattctattaattctgtctcagaggaaaaatcagttacagaatacgatgagtttattacatataaagatgctaatgataatgagattattccagttgatcgagagcgttataaatctatatatgagactgacaataattaatcattatttctgaaatatatagattaaagatggcaggtaggtgcttaacctatctgccatcttttcggttttatacctatatgtagaacagttcgtgcatgttgggctaccattcgtgcatagagggattgaaaaaaattaaatactctgttatattaagcacataccatggtaaacaaataaagttgtctgtaattgtcagacaattaaggaggggggggtgaaaacgatggacaataagcaagtaaacaaggcaccccagaaaagtgcccgtctcgtacttcaggcagtgactgctattgctcgaagtaatgcaaattcattgtgccgtggtttgttgtatgaaccaaaagtaccaacgcagttaaaaaaataagattgggaggaattgactatgatgttaaaaagtttaaaacagaagattgcaaaagtaggtattggtttgttttgtgcaggatgtgtatttctttcttcagcagcatattctcaggcggcatcttacaccgcttatgcacttaaactgaataagactaataactttacctctatgcatgcaaaaacaacatccgatgattacatcacaaatgaggtaacagcaattaccaatacctcttacgcaaatttctgggctgtcaataacagcaagagtaaaatatctaataagtataagcagggtgttggaacaggatcttgtaatttaatctttaccaagagcggttataattctactaacacacaggtcggtatgggaatggaaaattatcaatctcaattatcaactgcatttgtaagtggaaatgtagattttagataacagaagggatgggcataaacctcttcgtgggtttatgcccttttggtaaagattatgaaaaaaatggttcttatagaaatcaaacattgtattgatcgtgcagaatataaagttgtttttattgctctaatgattttaaatattgcttcgtatattttatgtgtaaaaaatgatataggaaaaagttatcaatttattcgttcagcaaatgaaaatttcgtattacagggcactgaagcggcatatattccatatataatgtatctgttattgcctgtttatgcaacaattattgcatcactttccttaataagagaagaaaaaagcaatagttcaatcctacttattcaaagaatcgggaaaaagaaatatttagcaggaaaattatttggcattctgattgtaacctttttgacaataacaataccaatgctcataaatttattattatgccacttgacatatccaatacatggatatgacagtgcttggggagaacctgattacgctataggtttggtatcatataacgctgacaattttcttgatatggtgagattgcaacatccaactttatataatctaatatacatttttaattacggaatttttggctcgggattagctatcttagcttatgctctttcatattataacaaaatgaaagttctatatttcgcaaagatacctggtgctttgtttatattctatattgtttttaatttgattgtttctgtctttgggctaaatgaattctctatacaaggttatattatgcctaatgttcatggaaatataataggagaaattgttctgatattgcttatttttggattaagtattggcattatacagagaaaaataaaaaattatgaagttatataagaaaaaaattttgaatgttaatgttggaaaatgcttactagtatcacttataacatttgtaattagatatttttatgctaatgtgtacttggggtttcataatagtctggttacaataacagaaggagtacgttcacaaatatattttgggggaatactaatagatcattcgtttgaccttatatctttatcattttttgcgattttgtttatccttgagatttgttatcttacaatggacttatttaatgatgcaaatgataacatggtaattctacttcctcgttatgggaaaaaacacataatttataaggatatattaataaaaatgatattacgtgactgtattgtagttgtttccgattatttgttttttctttttgtagagcatacctctaatggcttagaagatttcaaagttatttttatgctattgatagagatttttcatttgcaaatgattagttatttgttttcattttggaaagattcaattataggatacatcgttgcatttattgtattttttattccagtaatggtgtgtggattttatttttcaatgggaaatgttatatggaaaatttggcattattccttgctacatattcctttatttaattggcataacaagcttattatatattatgtcgaagaaaattacgaatggactacaagcaatatagatttattgaattttaagtcaagctgtctcatttcagttatatcatccgctgttttggtgtggataggtaaatttctttgcgaaaaaaaacaaatattgtgaggtgaatgatatccatgaatttatatgtaaaatctatttcaaagtcaattaaaggtgaaaaagtgcttgatgatatcagttatacatttgaatctggtaaaatatatggaatatatggtaaaaatggttcaggtaaaacaatgctactcagagccattgcaggttttataaatacagacaaaggatacataaaatataatcacaaggcattacataaagatatggatgttttaccagatttaggagctgttattgaaaatatttctttttggagtatgtattcaggatttgaaaatttgaaaatgctttccaatataaaaggaattgtatcagatgaagaaatatatgaaataatgatatactttggtcttgatcccaaatcaaagaaaaaagtaaataaatattcattaggaatgcgtcaaaaactagctctttgtcaagcactgatggaacatccaaaaattttgcttttggatgagccaactaacgcattggatcagcatagcattgatttatttcgtgaacgtatattggaagaaaaaaagaatgataccattactatactgacaagccataataaagaagatattgaaatattagcggatgagaagatatgcatggaatttggtaaaattaaggagttgatgtaatgaagaaatttgtattaactatctgtgttgtaatcatttgtatggtgacagccttattctatggaaagactgggataaaaacaactacaggggttcatgatcctgatattgctttatcagaaaatacagctatggaaattttctatacaggagggcagaaaacttcttactttaacaatgaaagtaattactcattggatgatatggaaaaagattcttctttaatagctcgtataactgtaacaaattctcgtgaaatgagtttacgatcaacaaaaacaatggtaaaaatagaggaaatctataaggataattctgctaatctttcagtaggtgactgtatttacattatagaacctgtatcatttgttagaggtgaagaattttacactaacggatggcaatatctgaagaccgaagatacttatttaatatttttaaaaaatctaggatgtattgatgggtataaatacaccaaagaggaagaaaattcatttatgcctgtatcggaaatatattcaaagagaaatctaactcatgatgaaagttgtgtggtttttgattcggcggaaactctctattcaagtatatctatgtttgcatttttgacctcagaaaaaactatagtagataattatgagaaaatatggaaaaacattacaaattcaggtaagtatgaatgatttaattatttatgaatgaatctctcctattctatttcctgtgagaagcgtatcaatgttagaaattcatggagatactgaattaagcaatatggaatcattcaatcttaaagaaactaaaaatggagataatagaaattgaataaaaagaaattggcaaagagtgttgtaggcattgctttaattgtaagtgtagctatacttatcgttgtatgtgttggaaaaataaagcacattcagaataaaaaaaatattattggtacatggaagaatgcaaatgcagaggaagtgtttacctttcaagaaaatggaggacttgttgtaaacaaagatatgcccgaattgggtattacctgtggcaatgcattatatagcatatcttcctcaaatatgatttttgtggaacagagagataatagcgtgaattttgagatagaagtagatcaaaacgaattaacaatcttctttatgggtcataaatattgggaattaacaaaatagcaattgcatataaagcgatactcatgatatccataaccataaaatatagagccgatgaatcactcgttatttcgattgtgagttatcggctctatttcattatttatggaagggctaaagaaatatcgtattttatagaaatacttttgacagatttcttctcatttttatgttcttttatcaagtgctataccattccatattcatcgcattcacccaatcttgcatttctgaatcaagatacaaacgggcatattctagtggattgtcaatcgccagtgcatccaacattcgttgagagttaggagtagtaatcaatccatcttctgccttgccacagtcaatccgaagtatgtagccattgtaataattgatgtctatgatgttgtgatatttattatattctgcatgaacgatattcatattgcaaagtcctttctcttatctgtttcagttgtagaagcatcttgaccagttccagccgattatgtgatttatataatgttattagctgttaccggattttgcttcccttgtttttgcccttatgaggtgtcgtaacacaagggaaaaggatataacataagggaaagtctaagggaaagctcacttgccaaaactgtagtaaaatcaaggcattgcggattttatcgtaacactttataataccagttaggtgttaaagaattgtaggtatcaaaatttacagttgtctataagatgtatgaaattaattgacaaataaagttgtcaatgttatcatcataaatgacaagaaaagttgtcaaagcaaaacgaaaggggactggaaattgcctttattaaatcgattaaaagaatatagatcaaaactgggaatcaatcagacagagcttgggaagcgggcaggagtttcccgccagacgatcagtctgatcgagcgtggggactattccccatctgtgacactggcattaaaaattgcaaagatctgtcaggttacagtagaagatatctttgagtataaggaggatgaaaacgatgaagagtgatacaaagacgagaaacacaaagaaaaccattgtaaggatgttagcggcaatgctgataggcggagtaataggaggcgtaagtactgtagtttatgaaattggttttggggaaaattttagtggaagatcgctgagccttctgacggaagtgacacggaggcttatggttccggggctcctgtcagtgcttgtcgtttcaattgcagcatatgagatctgcttcaaaaagctaagaaacgtctgtgatcggattgaagatgcagaagatgaggaatttcatcgactggattatgaggaagaaaggtacggagcaattctgcagtgtatcaatgtagtggcacaggtgctttgcattgctttgttgggaagtggatattctatgagatatattcatgatggaagaacttcgctggtaaaatttcttacagcatgtgtcctgtttttaatctgtttcttttactgtggcatggctcaggcccgttatgtaaaactgcttcagaaagtacatccagagaaaaagggcgatattgcttccaaagattttcataaacaatggctggaaagctgtgatgaggcagaaaaggaagctgtttatcaaagttcctacagtacttacatattctcaggaaaattaatcggaatattgttagttgtgacgatgatcgcgcatttatttttcaatacaggagtgttcgcgattgttgtggtcggtgtaatctatttatgtataactgtaaaatactgtgtttcctgtgttaaattaaagaataaatcatagcggttaactatagaaatttcagtaaataatgcaagtaattcgtgctctgccttttttgcgttaacataggaatgaacaataacgaaaaagacggataacctctttccaaagattatccgtctttcctttcatttattctttattctcttagaaatgaatcactccaagcagtattccagaaataagacatacaatacttacaccccagatccagaagaaacttgctttgatatgatctttgatctcaacacctgcaagtccgactccaaggaatgtagccggtactaccgggctgataaacgttgcacagtttctgcagacaaccattgcgattgctgtgtgtgcaggatttacaccgaactggtttccgatactgatcagaaccggaaggagtccgaagaagtaagaatctgtacagaataaaagtgtcagcggtacagacagtactccgatgatcagtggcaggaatcttcccatagactgtgggataaatgtcgccagtacgtttgccatatgattcatgatttctgtctcttcaagaacaccgaggaatactcctgcagcaaggatggtagatgccatcataagtgccggaccagaatgagatttgataatcttattctgcagttttgctcccggatagttcacaagcaatgcaattacacagccaaccatgaagatatagtaagatggtactttaacaaaaacaagacatacaatcactgccagtgtaagaattgcattgaatgcaaagagcttcggtctcgcaagattgttttctgctgcgttttctgctgcgttttctgctgcgtcttctgtcttttcttctaaagcgtcatattcttccgccttcacaattccctgtggtgctgtctctgctcctgctccacgttttttctctacgaatccccagaaaactgctgttgcaagtgcaattacaactccaaccacctgcattgggagcagctgtctccacagctcgttcggatcgattccgagtacagttgcggaacgcattgtcggacctccccatggcagcaggttcataacacccattgctgtaacacagatcaaaagcaatgttgtcggacgcatgtttaagcgcttgtacactggaagcattgccggaattgtgatcaggaatgtggaagctccgcctccacccaaatgtccgatcatggcaataatacatgtcatcagtgctacaccgactacattacttcccacttttttcattaatgcgttgatgatgcggtcaaacattcccacatctgtcataattccgaagaagagtacggagaagataaataacgctgcggttgagtgtactcctgctacacctgacgcaataaattctcccatttcttctacggtaaatgttccggtcgcaaccagaatcactgatgtaactgtagataccccggcaaatgcaagtgccggcactgttacatttctcagcaacaaaacaataatcatgatgatcgttgcaaatcctaatactgcaagcattgtctcattcattgtctgtccccttcctttctctcttttttggataaatttattatagaaaaagaagcttacagactgccttgattcaccttacattttgttaaggaaatcctttatattttttatgttttttcgcttttttatattgcaaaaaaggaacagaatctcttctgccccttcctaattcacacgttttcctcacactgtctcactgcatcgagaagcgttacctccgataccggtttttcaacatagccttcaataattccatgctgctttgcctcagcaagttctcttgttatgtgtgctgccattacaatttttttcatctgtggatattttccagaaattgacatacagaattctactccgcttccatcttcaagcgtttcatcaatataaagtacatccgtctctgcttctttcagatattctttcaatttctccacgtctctgcatgtaataatctcaatcccaatctttcggaaattcttctccagcaacttaagaacctttgcattatcatctgctataacgattctatattttccactcgcagtcggcacgattatcttctgttccgtatccattgcaggaagatacagataaaatgtgctgcccacacccggcttactttctactgaaatatatcccttgtgtgacatcatgatctgctctgccaatgcaagtcccagtccggttccttctccacctttctttgttgtaaaaaatggatcaaaaatgtgtttcatcgtttcctgattcattccacagccggtatcctgaatttggatttccacataatcttcccagctttcccgcaacttgtctgccagttcctgtgacaatgaatttctttttactctatgtgcaagaatacgaattgtccctttctgttttccgattgcatggattgcattcacactgatatttaagagcacctgattgatctgtgttgtatttcccaggatccatgtatgatccagattcatctgttcttccactgtcacttgcggaggacatacggacgaaatcattttcactgctctttgcatcaacttctgcgccggtatacttttatatacagtctccacattcttacggctgagcgttgaaatctggcgcacaacatccttcgctttctccgaagcttcataaatctcgtgtgcactgtcatattcttctgaatcttccggtaattccatcatcaaaagctccgcataacccatgatcggtgtcaggaaattattaaattcgtgagcaattcctcccgtcattgtgcccatgatctgaagtcgttcctgatgcgcaatattctcttctgactgatgaacttcttccaacagggaatttagttcgcgcagataaataatctctgctgccgatttctgacgatcaaagaccaaccttcccacaaagataagaagaataataataagcagcaagattcccaacataacaaaaagaattcttgtaaatccctgcctgataggaagatacatatcatcataatcaatcactgcactcactacccagaaatcccctccaagatctgccgaactgtacgcgcttactttatgtactttcggaagatttggcatggtccaccaataggaatcgtattctaagattccctctcctccttctttctgtttttcgatcatatgctccagactgctcagatcaagatgtggatacatttcttttcggccttcgatcacatcgattccccactgctctcctttcggatgcatgatgatctttccttctgagttcttgatcataacataaccattcgttccgactttaatgcttgaaatcagattcgcataaaatgcttcctcatttaccaccatacagatctgattttccgatggttctaaatagtggagcacaaggtatttctgatccttatcatcttccatctgatagattccgactccctgatctgtctctgtaaagcaaaccggatccgcatacactttcccactcaaactgttaataaaatttccattttcatcctgccaaaacagatcacagacatacgttgtctcttcttccagatatctcttcattttttgcataaatgcatctgtattctgaatcctatagtttccggcttcatcctgcatcatcacttctatattgtgtagcatctcataatcccactcatactctttcatggaagtttcaaggctttcacttaaaatttttgaagaattactaagctgatcgtattgattctgcatcagatctttactgtactgtttccatacacgatatcccattcctccaaatccaagaagcaccagaagaaataaaatcagaaatatccatcgaatccgtcgattttctttttcgcgttgttcttttgatttccatttcacatttttcccgtcggttttcatacttcacctcctcttctgattgacttgaattttatttaatattataatgttttttatagattgtacagtatttaaactgtattttcagttcgttttacaagggggatacacctttatgtcagataaagtactgattgtagatgatgatccatccatctgcaaacttctggaaaaggtcatgaaaagtaatgacctggagccaaccatcgcaacttgcgggaaggatgccctttccctgcttcgcacacacacctttgatctgatccttatggatgtcatgctcggagatatggaaggctttgatgtgatcaaaaagcttcggaatcaaggcataaacacacctgtcatgatcgtaagcggaagaaatgaagactatgattcactttatggtctttctctcggtgcagatgattatatcacgaaaccgttccgaccgcttgtactgggtgcaaaagcaaaagcgctgatccgccgcaacaagaatcttgtactggaaggcaatcagatgttagagagcggacctttctcttatgatactgcgacaatgcgtttctataagaatggagaagaattgattctttccagtaaagaaagtgctttgctccttctttttatgaaacatcctcagcaggttttcactaaagatatgatctacgaacatgtatgggggaacacaattgcagtggatgacaatgcaattatggtctatatcaatcgcctgcgcggcaagattgaagatgaccgtcagaatccgcagcatatccttacacttcgcggacttggataccgctttgtaccttaatgaattttcctgttttctaaaaccagaaaagtcgaagcagatggcagcctgctccgacttttttggttttacaacttatattctttcctctgacagaaaatttcaaaagaggttatggcacaaacatttaagatatgtagaaaatgtttattcttctgtcagtggagatttgacgatagaatgaagaaaaattgcaactgcaaggagatctgcgcagccgcctgcactcacattccgcacagagtatttttgatccagtcgtttcagatattcgactgcatcctcccggtaggctccaccggacttaagaaatgcatgaatttcttcctgcactttctcaagttccttcggtccccgccttgagatgatatttgagtcctgggtactgctcatcaatacaagcagcgtctgaagtttcacacgattccagtctcttccctcttcaactccctgtctgagtgtcggaagtgcgagttgaaacagagacgggtatcctgcaattgcctcaccccgaacccctgaggttccatatttctgaagattctgctcaccatggctatgtgctttcttcttcataaggatcctcaactcatcagccagtatctttcctaccatctgacattgaatctcacgaagctgtttccattcaatcacaccttcgttttctctggcacatcttcccgctgctgcacaatagattcccagcgtaaagatcagtcccttgtgtgtatttacaccgcccgtcgcacggtacatcgcacgctctgcctgaacaccaaagcttctcacatcacgaaacagatcctgcagacttccgtttgaaatcgctccctgagcggccatccggacaaaccacggatagagagcataggcactcttttcaaaagtatgtacatccatatctttgtgagcgcctgtagaaaacagatccaccagtcccggctttggtgttgtatacacttctgccagaagcgctctataagcacggtttccgataacttctccaatctcggatgccatagagaacatcctgttttcctgaactgctttctctgctctcataccattttatcctttcttcttattttcagccttttctttcttctcagctttttcttcagccttcttttcatctgcaaactcgaatggcttgatttctcttacaacatccatgattgttccgtcacggctctcaatgattccaacaacacggttgccgaactctactttctgcggctcacctgcgatagaataagcaatatctctgagttcttcgattgtcttgaatggaaggtcaacatctttcattgcctcgatcaggtctgttctctttggattgatcgcgataccataatcagtaattacaacgtccacgctctctcccggtgtagttactgttgtaacctctgtacagatagccggaattcttccctgaagtaacggagcgataacgatcgcacattttgctcctgctgctgtatcaggatgtccgccctgtgcgcctgtgatcattccatctgatcctactactacattacagttgaagttaacatctacttccagtgctgcaaggattacaaaatccaacttatttacaacagcacctttattgaatgggttcgcatattctcctgcactgatacggtaatggtgaagatcctttacagattctactgctgcaaggtcgaaatcctgtgtatcaagaagtgcgtctacctgtccattgatcagaagatcacacattggttttgtcagtccaccaacaccaaaacgcatgcggatatttctttctttcatgatcttagccagagaaattgtagaagcaatagatgctccgccaacacctgtctggtaagaaaaaccatctttaaaatatggtgtatttacaacaaactgcgtacagtaatcagccatcatcagctttctcatatctgttgtcggttttgctgctcctgttgcaattttctttggatctccgatttcatcaacttcaactacataatccacctttgtcatagaaatatgtgccgggaagttcgggaatggtaccaggcagtctgtgattgctacaactttgtttgcatggatcgcatcagccatcgcataggaaagaactccacagtctgactttccaccaataccacggcagttaccatagtcatcacaagttggtgttccgataaatgcgatatcgatctgtgtctcgcctgttgcaagggctcttacacgtccaccgtgggaacgcatgattgcaagacctttcagcttaccgtgagaaattgcttctccgatttttccacgcacaccggaagactggatgtttgtgattgttccatcttcaatcatcggtaccagttcatcatgtgcttttccaagagaacttgcacagattgtgatatctttgattcccatcgcatgaatttctctcatgaccatattaacaacatagtcaccctcacggaaatgatgatggaaaccaagtgtcattccgtctttgattccacatttcacaagtacttcatgaatattctctacaagcttgcttccttcagagttgatcacacattttgtctccggtccgtgtttcttataaacatgtccatcaaaatgatgtactccctggaacacttcttttcctgttgctttcaaaatctcttctggtatatctcttccaactgcatttaacatcttacaattcccccttatatacgcctgaagcctttgccagttcaatggttctcttcgcaccgtcatagaatgcaatatcgatcatcttaccgtctactgtaaatacaccgattccctgtgctttcttagaatcaatctctcttacaaccttctctgcaaagatgatatctttctgtgttggtgtataaatctcatgtactacattgatctgtcttgggttaataattgattttccatcaaatcccatcagatggattgtctcaacgtcctgtttaaatccttccatgttgtcaagatctgtataaactgtatcaaaacactggattcctgctgctctcgctgcgattaccagattctgtcttgcacccatcagctcaattcctgttccagtgatatgagtctgaagatcctttgtataatctcctccggaaagtgcgataccaaaaagtctctcagaagactcacaaatatcaagtgctttcataacacctcttgcagactcaacagctgccatgataagaacactgccttccggtcttccaaattcacgttctgcatactgtacttcacgctcaaccatcttgacatcctgtgctgattctgtcttcggaatacggattgcatcgcatcctccggctactgaacaacggatatcttctttccagtaaggtgtatcaagtgcattaattcttacaactctctcacatcctctgtaatcaattgtcttcaatgcatgatacagtgagaatcttgccacatccttctgattctctgcaacagcatcctcgagatccagcataatagaatccggtttgtaaatatatggatctttgatcagtcccggcttctgtgcatttaaaaacatcatggttcttcttaaacgttttttattcggattcattatctgatggcacctccccatggtaaatgttcaatctgtccaacggaacgataaacagctccttcaattcttgccttgatcgtacaatcaagtgctcctttatctacaatagaaattcttacattatcaacgcccagatgttccaatgtctcatatactactttcttgatctgatttccatactgattgatcaccgcactgttcagtgttaattcaatctttccttctccctcttctacagttacctggcagtcactggattccagtgttcctgctactgcaggtcttaagatttccatcacaattcctccttcatttgtccaccttgtgatttcgcagaccggccgattggcacttccggccggtatccgcagtgttgaccggtttcggattatccctggccggtctggcatttcttttggtttcttgaacttatcatagtcttgaaatcttacagaaagaagaacggttaccttaatattcgttaaggtaaccgtttctgtcttaaaactccataagatcgtctaattctgtgtctgtctcttcttcattttcctctgcttttctgacatctttcatgccgaaaacaagcatcgcaaccatcgtaactacagcagaaatcacaattgcaattgccgcattgatcatattctgaagactatccccaccgacatagcatggaagaccaagtacacttgccggtcccggtgaataggttctcattctgctgaatcctgcccacagacctgcaacaccaccgccaagcataacagaccatagaacactcttatatttcagcgtgataccataaagtgccggctctgtaattcctccgatcagagcactgatagctgctgaaaatgccatctgtttctttcctgacttcttagacttaaggcatacaacaaatgctgccgctccctgggcaacattagagcaaaggttgccaggacctgttgctgttgcatatccacgaagtgcatactgggaataggtaattgctttcaaaccattatgcatacctgtcataacgatcagtggtgaaaatgttcccatgatcaccggacagaaccatggaatattggcatccagccagttgaacagtacaaccagaagattaccgcaccaggtaccgatcggtccaagtactgtaaatccaacaacggatgtgatcacaaatgtaatgactggaactgtaataaacttgatcgccttcggtacaaatttcttggaaattctctctaccacagacataaataacgtaataaaaatcgctggcagcacactggaagaatatttcaccagtgtaaccgggattccgaacatccggatactgtcccctgcttccacaaatcccataaaggtcggatgaagaagcataaaggacatgacagctgccatgtactgattacacttgaatactttggcagatgaaaaggccagcattaccggcaggtaatagaacactgcaccagataccatattcagcaggacatatgtctgattgtcctcaggtacgattccagctgtctttaaaagaatcagaattgcctggagaatacctgctccggcaagacatggaataattggaatgaaaatggttgacacggtaccaaggaacttaccaaatgcatttttccatgtcaatttttctttttcttcacggattgctcctgctccgccttccaccttgatgccaccaatcttcctgatttcttccattacaagatccacatctggcccgatgatcacctgatattgtccaccatttttcacaactccggcgattccgtctgttttcttcaattcttccgtcttcgccttttcctcatctgccaaataaaatcttaatcttgttgcacagtttgtaacagacttgatgttttcttttccacctacaagagagataatctgctctgtaagtttcctgtaatttttactcatcctttttctccttcccctgttgttcttccttttcccttttttcctttgaatcctctgtcagaatccttttcaaccagatttgcagtaaattcgtccactgttcacagccttcatcataatgatttgctacgcttgcactcactttatccgccaatgcacagccgtgaactcctcctgcaaacaaatgcagttccaccggaactcctgtctcaaacagcttctgtgcaaatgtaagcgcacacaatgcatttactgatgtatccgtagccgaatgccacagaaaaaccggaggcatatccttatgaacatttgtatatggatcaattgtcatcttctgttccattgtcggctctgctgtcctgaactggcaaaggtatttatattttgtgatatttctacccgatgctgtcgcaaatttttctttccagtccggaactgccatattggttcttgcatatccaagtactgctgcctttggttttatatagttatcacctaatacttcttttccaaaggtaagataacttgctgttaggtgtcctcctgccgaaaatccaagcaggatcaattggtctttgtctacattccattcttctgcatgctcccggatcaatgccagtgcatttctcacctggtagatttgtacaggaaaatatccatccggattcatttccggaagctcttcttccttttcaaaacttttcggcttttctttgaatatgacagaatattgaagtacaaatgcatgataacccataccattgattttcagagctactggttctccttcttttcttgccagtgtcgtatatccgcctcccggacagattacaacagccggacgtttctgctgttgataatatttcggataatcatccagaatataagtctttaaaacagccttctcatctttctgatcgattgataatgtttcaattttcattgctttcctcccatcaataaaagctcattcagtctgcaaacttcatgagcttattatagaaattaccctttcgcttttcaaataacggaaagttatctttcttattccttatagttatttatatgattgaccacttttcttctggtctgacgctttctgatacaactgtgtcagatattgtaatggttctgtccgatagcttccaacccggtacgccgccacaaattcccagataattttcttatttccaaaagaatagatatcaaactgatctctgtggttctgcattccaagacttccacagatacagattccatatccctttttaaccagtttatgtgcagttctcatatctgcaaaccggattacttccggtgacatatgatattcttccagcactttatcacagatttttccaatcctcatatctttattaagcgtaataaacgtctcaaattcaaactgtgtaatatctacccatggatattcaaatccatatttaatgaccggctcctttcttaaaggagtttccttttttactgtcaggacaatttcttctcttccaaggagctccgtatagaattccggatgctgttccctgtaatcttcatctactacaaaatagacaacatccaacaaccctttctgcaacatttcctccagcctgtccacatcttcttcatatagttccagccgaagatcaggaaagttctttctgaactccggcaatacttctggggtaagtccactgcttcttgccggagtaataccaacccgaatcgttccatgtctaaattgtacaagttcttgcagttccatcaaaaactgggcttctctttctttggtctcctgtgcaaaacttaaaaacagctttcctgccgccgttggaatgtactctcccgaaattttttcaaaaagtgatacaccaagttctgtttctatatttctgagacacttactcattgccggttgtgaaattccgatttttctagcagctttggtcaaatttttttcctgttctactgccagaatgtattccatttctttaaaattcatctattattccccaaactatagcttattgttttcatgcctgattgttattttttctttctagctgtaattaattttagcaaagttccacaatcacagcttcgattttttatgctattttccttgtttccgatgttcagccatcatgaatttctgcattgttttaaacttcttctactgctttcagttccccggtctctgaattcatgataaacccacggattgtaacatctttcggcatcagtgggtgattctggagtgcatacacagtatcttcaacagactgttctacgctctcaaatcctccgagccacgtctcaagatctactccgctgtgtcgtatgatatcgatatgttcttgtttcactccacgctttgtcagatcttccagtaattctgtgccgttcattccctgtacgccgcaatctgtatgaccgattaccatgacttcctctacaccaagttccacaattgcaaccagaagacttcgcatcacacttccgtaaggatgcgtgatcacgccaccggcattcttgatcacttttgcatctccgtttctgattccaagtgccgccggaagaagttcaattaatctggtatccatgcaagtcaggattgcaagctttttatccggatatttgcttgtaagatatggttcatatcctttctcttctacaaacttcttattgtacgctacgatctgttctatcatgtatccgtcttcctttctctgttttctgaccagtccgccatttttgttttttctacaatgggcaatgaaccgatccatcttattttctttttattatacttacatcccatttttgttcaacaaaacttaacagatattaatttctttttttcgtacaatttttcatcttcacatcataaaatcccatagcagacaatccctaacagtgccgacagaccaatcaccttcggaacctgccagttcttctttccgatcagataaagcatcaggagtccgattccacatgccggaagatccggtctgctatccgaaaaataattttctcccagaagttctgcaattgttactataatcaacacgatacagattggttttaaaacaagcaggatttttgaaaatatctcgctattcttaaatttttcaaaacagattgctgtcaacaaggtcagggtgaatgcaggcattaatacacctgttactgctacaattccgcccagaacacccgcagtcctttctccggcaaatgttgcacagttgattccaagcggtcccggtgtcatctctgcgattgcgatcacatttgtcagatcctctgttgtcatccaatgatgcgcacgcatttcttccaaaatcagcggaaccatagacataccaccaaagcttgtaaaaccgattttcacgaatgcaaaatataattccattaatgtactcattctttcatctctttccccgttttcttcatttttttattcactacggagaacagctgccagattactacagagcttacgccaagcccgaccagctcaatattccctatctccgtaaaagtacataataataatgcaatgcctccggctaccacagaaatcctcgtcttgaatgcctcttttccaagggaaaatgcagcactggcaatgattggaacaactgcacttcgaataccacgcagtgcacttgcacaccagacattatcttttaatttactataaaacatcgtcactatcgaaaggatcagtattgccggtgttgtaattccaagcactgcacaaaaaccaccaaaaactcctcctacggaatatccaaagatcatactgatattcgtgatcataattccaggcactgatcttccaactgcaaccatatcaagaagttctgattttgtaagccattttctcttatccacaaattcctgctccatctgggcaagaatgctccaaccgccaccaaatgtaaagcagccgattttaaagaaaaaaacaaagagctctaatccttttttcactctgtctttcatgttccattctccacaatatcaaacctataattattgtttttaactctattgcacattttatctccgttttaatcataagtaaaatatatgttttattatagttttcatagttttttcttatatagtattgatttaaagaatttgatcggatatgataagcacaaacggctagtaaaccataattgttttttatcggtaatgcattttataaaggggagttttataaaggagaattttatgaactggaatcagcttcactacgtacttacgattgcacaggaaaaaaatataacaaaggcagctcagaagctttacctttcccagccttcgctctcaatgagcctgaaaactctggaggaagaacttggtgtagaaatttttgaacgaaaaaaaggtgtccttgaacttacttatgccggtgagcttttctgtcactgggcagaagattctctacgttctaagcagattctatccgaccagctttcagacatttcatccaatgcaagacataagatccgtcttggcatcagtcctcatagaagcctaatccttctgcctgatgttctgacagatttttacaaaacagctgataactgtgatctgcagattgtagaagagccgacttatcttcttagagaaatgctggaagatgaccaacttgatctgatcattgatgttcctcatccggacacgatcaattatcaaagtgaactggttgcccgggaacagattctgctcgcagcaccgaaagcaatggacaagcagcttcaaaaaaatctgactttggacggcagccttagattaactgcggatctaaaagcgcctttcattctgctgacagaaaaacagatcattgggcagatcagtcagagaatctttgaaacaagcaattttcgtccactaacgtctattacctgttccaatatagacacagccttgactttagttgcccgtgggttgggtatctgctttgcaccggaagtttttgtatggcaggaacgttttgctgatcatatcagttactatccaattaataactaccgggacacaagacagatttgtctggtttaccggaaaaatcactatttaaatcaacatctccggctgctgcttgatattttcagggaaaaagttccctttttatatcagcactaactatcataagaatgattctgtcattaatcattgggttaatcatttggaatcattcttattctttacttttttgtaattcatgatagaatgtctttataattgaaacacttttttctgtcaaatcaaaatgacagaactatgatatttatcaggaggattttatgtctgattatataatttcacagatctccccgtccgacacacgggcaaacaagcagataaacgaactgctccttgcagaaggtatccgccgggatgcaaatcttgactacacctgcggtatgtatgatgatgagatgaacatcatcgctaccggaagctgttttggcaacacactccgctgtatggcagtcagcagcgcgcatcagggagaaggactgatgaatcagattgtaactcacttgatcagcgtacaattcgagcgtggtaatacacatctttttctctatacaaaatgcaattccgccaagttttttggtgatctcggtttttatgagattgcccgaattgacggtcagattgtatttatggagaacagaaaaacaggattctccgcttatctggaacgtttaaagaaagaaagcgaacagtcagaagttacgaaacggttcgccactgacaatacaccgattctttctgaagtatcctctgaggcacaaaaggaccttcgcattgcagcacttgtcatgaatgcgaatccatttactttggggcatcaatatctggtggaaaaagctgctgctgaaagtgatattcttcatttatttatcgtcagtgaagatcagagtcttgttccgttctctgtgcgaaaacaattagttctggaaggaaccgctcaccttaacaacatcatttatcatgagagcggtccttacattatcagcaatgcaactttcccaagctatttccagaaagatgccgatgctgttatggaaagtcatgcgaaccttgacctgacgatctttgttagaatcgcgcaggcgcttggaatcaactgccgctatgtaggtgaagagccaaacagccaggtgactggaatctacaacaagattatggctaaaaaacttcccgaaaatgaaatttcatgtacgattgttccgcgaaaagaagctaatggagctgtaatcagcgcatcgactgtacgaactacgctaaaaaatgataatatagagttgttgaagacgcttgttcctgaaacaacacttcactattttcagagcaaagacgcagctcctgtgattgcaaagatcaaagttgctgaacatgttgtacatcattaagatcaactactatgtaaaatataaactgcgtagaattgctgaaaccgtgtaattcacccttaaacgaaacactagaaaatgacaaggaggtttccttatgcaaggagaacaggttgtattaacagatatgctgcaatgtcgtgagcggcgtgcacaaatccaggatacattcattgaacaataccactgtccggtcatttcattctgtatgaacatcccaggacccgtgaagacaaatgaacagatccgcaccgcctttgacagtggaaagaatacgctgcttctaaagctgaaacaagcggaggcagatattaaaaactcagttgaaattcacgaaaaaaccggagatgaattattgcttgcaattgactgtccggcagaaaaaatcaaaaatctcacaactgagattgaagaaacacatccgattgggcgtctctttgatatggatgtgattgacacagacggacagaaactttcccgcccttcctaccgcaaatgtatcatctgcggctgtcaggcgcaggaatgtgcacgcacaagaaaacacactgtagaagagatgcaggcaaagattgaagagatgttaagcgcagaataattgcatttccaccaccatcatattaaaagaagattttatcaacaaaaaggagaattcaaaatgttagtatgtgattatatcgtagaacagattaacggagattatgcacacttaagaagagttgatcttccggatgaagaattgaaacttgttgccagagcactgctcccggctgagattgtagaaggttgtaaactgcactatgaactgatgcagtatacaatcatctaaaaaactatcaaatcaagaactcccgtttagagacttctttttactgctcacacgatgtgcgatcagtaacgaaatatctctaaatgggagttttcattttctctttatccgctataatcttttatattatccgccaattaatcttcatcaaacggaacaacatcatcctctgcatttccagctatatctgcagtatcttctgccttcactccggtcgttccttttaccttcatcgttctgacattgatcccattgacctcaatgtgatcatccaccggaatcacaaggcactgtcttccgtcgatcattcttgtctctacaagatccattctgtccggattcactttgatcacaacatccggtgtctcgatattgaactttcttgtctctgcgatattacttgccagaagcgttgctttctcacctgcattttcttcgaagttcttctcaaagttctccatcttctcattcggcacaccgctctgctcgaaaatcttcttcacatccgttttatccaatgtcagcggatccggttcttctttgtgttcttcgatcatatcattcaatgtctcgtgaatgttgcggacagtctcgtaatcaccatcttctcccaatgtatcttcaataatcatctggaatgtctctttctgtgtgtccgcagacatcggcatcttcgcaccaagaagctggtcgatcatctccggctgaagatcttctgatttcttcgtgtaataaagcacactgtgaagatcagtacttctgtcgttgaatgccgggaagaggaatcctttgtccggcttatcaacgatccagtcacggattctgtcctgaatacagttctcttccgcgttatagctaagccctgcctttgacagactgaccggacagatgctcatcagtatatgctgatatacttcatctgaagcatcatccatctcaagatcatcggatgttcttccaggaacatcgtatgctgcatggatcaaaataatgtaataattctccgcatactcatacgttgcaatcactttgtcatagaattcttccaaaagcatatcgtcttcgagacggctgtcacgaagcttcagaagaaattcctgcgttccgcccggcatctctgcatccagtggaaactccatattcagcatattctttccgatacttccggaaagtgtcttcttgaaaatatcaaaatatttaaatgcctcttcttccggaagtgcgagaaatgcgtcttttgactccatctttttattcttctcataatccacatagcagccacagattttcgtaatcgcacagtttttcggtgagaactgcttacggatctcaagtacttcttttttattcatatatgtttcctttcttcgttctatgttataatgagtaaaccaccttttcggggattgtaaataccgtagacataacatttttattttacctctattttcataagaaagaaagatttgattttctcaaaatactatggtattatacgcattctgaaaatacagaaaggaattttttattatgtcatccaactcagttacttcaactgcccgggaacatgtatttccactctttgttaaatatgtctcagcaaatgtactcggcatgatcggatattcttgttatatccttgccgatacattttttgttgcccggggaatcggctctgatgcgattgccgcgcttaatctggttcttcctgctttcagcttgttaaacggaacagggctgatgatcggtatgggtgctgctgcgcgatactcgctttcctccggcagagctgacagtgagattcaccgcacgatcttcacccaggcacttcagcttgcatttgtagctatgctgttctttttcagcatcggactgttttttgcaagacctctttgtgtcttacttggagccgacggaactacattgccgcatgcaattccatatatcagcatcctgctcatgttttctcctctgtttttatgcaacaatctgttgaattgttttgtcagaaatgatggagaaccgcggctttcaatgactgcaatgctcgttggaagtctgacaaatattgtgctggattacattttcatctatcctatgcagcttggcatgaccggagctgcactggctactgcaactgctccactggttgggatgagtattctgtccatgcatttctggaaaaagaaaaatcagtttcatctggtaaaaacaaggatacatctaaaaactgctgtagatatctgtcggcttggagtttcttctcttgtagctgaattatcttccggcatcgtaattcttgtcttcaacatgctgactctgaaattcagcggaacgaccggacttgcggcatacagtatccttgctaatatcgcactcgtacttgtggcaatctttaccggaatcgggcagggcatccagccgattgtcagcagccaccctggtaaaaatggagttcctgtacgccaccaggtaagacgctatgcattaagcactgcattacttatggctttgatcgcttatctggttgtctttgtctttgcagttccgattgctgacttgtttaataaagacaaggatccgttgcttacttcaatggcagcagaaggcatgcgcatttactttgtaagcctgttcttttcaggcatcaatatggtgtcagccacttatttaagtgcttccgaccagccggtaccgggattcatcatctctatcctgcgcggccttgtactgatcctgccgattgcgttcctgcttgccgcacttttgggaatgacaggtatctggctctgccttcctgttaccgaggcaatcgtgtgtgtcgtgaccttcttctttctgagaaaattttaagtaaagtatttgtaaaagaagaactctgttgcgaatgtattgattcatacatctcataacagagttcttttttatcttattttaaatatttcgctgtctcaagaatacggtttgcattctcaattctctcctgtgtcggaggatcgattccctctaacttgtaatcatatccaagttctttccacttgtatgcaccaagtgtatgatatggaagaacttcaacacgctctacattatccagtgtctcgatgaaatcatgaagtctctccaggtactcatccttgtcactgcgctccggaacgagtacgtgacggatccagattggtttcttgatatcagacagataacgtgcaaactcaagaatattcttgttgctctgtcctgtgagaatcttatgctgctcatcatcaatgtgtttgatgtcaagcatcagcatatctgtgtatttcagcagctcctgcagtttaccaaagaatggttcttcctttgtaaatacagctccgcttgtatcaatattggtatgaactccctgttctttcgccttcttgaaaaggtcaatcaggaaatccatctgcatcaaaggttctccaccgctgactgtgataccacctttgtctttccagtagcttttatagcgaagtgctgttttaagcagttcgtctgttgtcttcagttcgccatcctgcatcttccatgtatccgggttgtggcagaactgacagcgcattggacatccgcttacaaaaataataaagcgtacgccaggtccgtcaacggaaccgaagctttctgttgagtgaatatatccttttacttctgacatgttcttctcctcctaaattttattgtaactgttcagagccaacctccaaaatgctacgcattttatagctgttttatgaaattttgcttggctctaaacagttacattttatttttaaaaaaggacgcagcatggtgaaatgactgcgtcctgatgtaatatgcataggctaaagccctgaattccagagcatcgccatgctcacagctcgattccgcttcgcttcttctcgctgtggggctgcgccctatgaaaccagccagtcaaaagtctcttagcaagcaagcttgcacgagtcttttactgtctgatttcgcatggcttggctgtattacatatgatcgtggcaagttcttgcgataacgtcaagctgctgctcacgagtaaggtcgataaacttaacagcgtatcctgatacacggattgtgaagttagcgtactcaggtttctctgggtgctccatagcatctttcagtttgtcaacgccaaatacgttaacattcagatgatgtgctccctgatcgaagtatccgtcaagtacgtgagcgaggttctctttacgctcttcatcagaatgtccaagtgcacctgggttgattgtctgtgtattagaaattccgtcaagtgcaagctcgtaaggaagcttagcaacagagttaagagaagcaagaagtccactctgctctgcgccgtaagacgggttagctcctggtgaaagtggctctccagcctttcttccgtccggaagagatcctgtagccttaccatatacaacgttagatgtaattgtaaggatagatgttgtcggtacagaatgtctgtatgtgtgacacttgttcagtttgtgcatgaatttcttcagcagccatacagcgatttcgtctgcacggtcatcatcgttaccatatttcgggaagtctccctcgatctcgaagtctgtagcaagtccatcttcgtcacgaacaactttaaccttagcgtatttaatagcgcttaaggagtctactacgtgtgagaatccagcaatacctgttgcgaaagaacgtttaacgtctgtgtcgatcagggacatctgagctgcctcatagtagtatttatcatgcatgtagtggatcatgttcagtgtatcaacatacagcttggacagccactccatcatttcatcatatttagcaagtacttcatcgtaatcaaggtactcagaagtaattggctggtaagccggtcctacctgtactttagtcttttcatcaacaccaccgttgatagcgtaaagaagacacttagcaaggtttgcacgagctccgaagaactgcatctctttacctgtctctgtagcagatacacagcagcagatgctgtagtcatctccccataccggacgcataacatcatcgttctcgtactggatggagcttgttgttacagaaatcagggatgcgaacttcttaaagttctctggcagtcttgaagaataaagaactgtcaggtttggctctggtgaaggccccatgttgttcagtgtgtggaggaaacggtagtcagtctttgttaccatagaacgtccgtcctgtccaagtccagcaacctcaagtgtagcccatgtcgggtctcctgagaacagctggttgtaagatgggattcttgcgaatttaaccatacggaatttcattaccatgtggtcgatgatctcctgagcttccttctctgtaagtgttccattcttaagatctctgtcaatatagatatcaaggaatgtagagatacgtcctacggacatagctgcaccattctgtgtcttgattgctgcaaggtatccgaagtacagccactgagctgcttcgtgagcattcttagccggctgagaaatatcgaatccgtatgctgcagccatctctttcatctctttcagagctttgatctgatctgcaagctcttcacgaagacggaaatcctcacccttcatgccgtgtcttgcgtaacgctcgaagtcatactgttttctctcgatcaggaaatcgataccgtacagtgcaacacgacggtagtcacctacgatacgtccacgtccgtatgtatccggaagtcctgtgatgatcttgttatgacgagcttttttcatctctggtgtataaacatcgaatacaccctggttatgtgttttatgatattttgtgaagatctcatgcagtttctcgcttggctggtatccgtatgttgtacaagcctgctctgccatcttgattccaccgtaaggcatgaatgctctcttcagtggtttgtctgtctgcaaaccaacaacctgctcaaggtctttcatgctctcatcgatatatcctgggccgtatgctgtcagaccggaaacaacttctgtctccatatcgagaactccgcccttagctctttcttctttctgaagttcctgcagtcttccccataatttgtctgttgcttctgtcggtccttcaaggaatgcctcatcaccttcatatggtgtgtagttctcctggatgaaatcacgcacgtctacagagtgtgtccattttcttcccttgaagccagcccactgctcaaaattagccattgaaaaatcctcctatattctttcctaaaatagttttgtaattgttttacgggcatagtataacaccgtgttaaataaatgacaagcgtaaaatcgagaataaatatcggaaattgctttgtattcgatttagtacaaaatatgcgaaaaaacgcccattttacggggaattgtacaaactttagtacagtaaaaatgtaccgtaaaaagaacattttccccatgtgtacggtcggattcacacgcaaataaacgatctgattttctttctgaaaaacctctaggtacttttcctctatgataacgttttcactttcttttttctttatatttttgtcaatagagttatattctgttttttgatataatagtgcattagagtatctatatttagtttatgaaagaggaatattatggaaatcagaaagaccaggccggaagaattagacgtgcttcttaaaatgtacgaaaacgcacgcagatttatggcaactcacggaaatgcttcccagtggggaaacacttatccttctccgcagttaattctggacgatattactgaggggaacagttatgtctgcacagagcaggatcagatcattgccactttctattataaagaaggtgctgatcctacttatatgcgtatctacgatggcgactggatcaatgactcccgttacggagttgtccaccgcatcacttccaccggaaatgtaaaaggtgctgcttccttctgcctgaactgggctttggagcaatgcggcaatatccgtattgacacacaccgggacaatatcgtaatgcagcatctgttagataagaatggattcaaatattgcggaatcgtatatgttgaggatggaacagaacgaattgcttatcagaaagtggtttaataataccaaaatccataaagcaaggagcagagacatttgattttaatgtctctgctccttgttgctatatgtctcacagaatcttgctgcgaaggacggttcttctccacctgcatagagatgtgagatatctcctactttcaatcctcggaaatatgccgttccctgttctctctcttctgttactacttctgtcacagaagtcggtgcaagagccagactatgccaaagcacgaatggtgatacattccataaatgggacaacagcacgcagctgattccgaaatggcagaaaaatgtcactgtctcatcactttctttctccacacgataatgcgccccttctcttacatatccatgctctgcgagaaaacgatcaaattcttcaatcacatgatcgtatacttctacaagatcagaatttttcgccacttctgtttcacgccatgcatttttatccatataagcttcatgttctgtccaataccccggaaccatatcccatgcaattctaggcaggaaatgctcaccttcttttttcacatcgggatatgctttttcaagttccggatttttattcaaatcaacctgcgccgggaactcttgcagccaatccaatatttctgctgtttttccagttacctcaagacatggagtcgccgtatccttcgctcttccaagtggagacttatagcattcccccatattcatagatactgcacgttttgcaagcagtgccgcttcacgtcttcctttttctgttaatgtgtcatttacataatccggatctccgtgacggatcaatagaattctcatcgtgtttctcctttgtaatcaattattttctccagccaatcctctgccagttttggccaactctgtacttctttcagtgtccttcgtatctcttctttttgctctactgtccatttcggtggctgtgttcttccaattccatttttcacaagcagttcttctcccatttcctttggaaatgaagtttctcccgcaaggattgcttctgccagcatacggagttgctcctgtgtataagattctctccctctgcgttccagccagtcctctgttgcaacagacataccatgcacgccttctgaaaatacatgatgtgcgaatggaactccttcttccagacatttctgtgctaaaagataactattctgcaccggaactgttccatctgttgctgtctgccagataaagcatggtggcatttcttttgttacatgcttttcaattgacatatattccagctcttttcttgtaggattctttccatataatgctacaaaagaatctttatgtgtgtactttcctgtagtgattaccggataagacagcacagcagcatccggtttgtttgaaaacttctgatatttttcatccggatcctcgatatccgctccatgcacacacagactcgcgcacagatgtcctccggctgaaaatccgcacaccacgatccgatctgacaaaacgtgcagctgctctgcacgaaaacggatcattcgcattgctctggaaatatctttcagcggctgaagctttaatggtgcttcatccagtggattcactgtatattcaaggacgaacacattataaccggcctgataaaattccatagcaaccagatgtgcttccgaaggcgatacaagtctgtaaccgcctcccggaacaaccagcatcgccggatgcatcagctcatcctcatgaatatagctgaccataatcgggataaaaccatgcgccgcagggtaatgatattcttctttgtgccataattctattctttcgcctatcatgtgttaatacctcctgtctgatttataatttgtgcttttctgttattcttttaggagcacggactttgctcgttgctcgcgtaaaaaagccacgaaagacaagatcccccaaccttgtcttccatgactcccattacatacactcaacttgctttacagttcgaatccttccagatatggattctctgcctcagaaaacttctcttcctcaaccatctgcgcgattgccgggtcaagtggcatctttccgagaagcggaacgttaagatctgctgcgatctcatcaatgtggctttctccaaatactttaatctctttgccacaatccggacacttcacatagctgtagttctcaacaattccaagaaccggaatattcatctgcttcgccattccatatgccttcttcacgatcatctgtacaagatcctgcggagatgtaacgatcacaacgccatcaaccggaagagactggaatactgtcaacggaacatcacctgttccaggtggcatatcaacgaagagataatcaagatctccccacataacatctgtccagaactgctttacaacacctgcgatcactggtcccctccagataaccggtgcttcctcgtcttccaaaagaagattgacagacatgatctttgttccgtctgctgcttcacatggaagaattccctgctcagttcctactgccatctcatgaagtccgtacatctttgggatagatggacctgtaatatctgcatccatgataccaacattatatccttttgctctcatcattcttgcaagggatgctgtcacgagtgacttaccaacgccgccctttccactgacaacgccgatcacttttttaatagatgaatacatgttcatcggttcatgcatatcaactttcttacttgtgcatgttcctgcactggcacagctggcacaggattcctctgaacatcctgctgttttctgctcttctgccataataccataacctcttttctacaaataaatagtggtatcattgtagcacattttctcacagaatgataggctgaacctatgcttttatttttctaagtgttatacttatgttaattcttaattcattctaacttgaatacaattagaaaggagttttcctatatgccagtaatatccgaacagctcaagccaatcgataccgtcaatggattccagatccgtcccggctttttccgtgaatttggtgcagtcgctatcccgggtggtgtcaactttacgattcatacacacggagctacctcctgcgagcttctgctgtttcaccgcaaagccgaagaaccttacgccgtgattccatttccggaaagttacaggatcggattctgctattctatgatcgtctttgatctggatatcgaagaatttgagtacgcctatcgattggatggtccttatgatgaaaagaaaggactccgttttgataaaaacaaaatcctgctggatccttatgcgcgcgccgtcaccggacagagccagtgggggcatgtaaataacgcccagcatggttatcgtgcccgtgtggtacaatccaactttgactggggtgaccagcgtcaccattctattcctatggaagacttgatcatctacgagctacacgtccgcggatttaccatggatgaaagttccggtgttaagcaccacggtacattcgaaggcctgcgcgaaaagattccttatttgaaagaacttggagtcaatgctgttgaactaatgccaatcttcgaatttgatgagatgcgtgatgtacgattgattgatgaaaatgaacttattgatttctggggatataatccggtcagtttctttgcaccaaatacaagctactgttcttctatggaatataaccgcgaaggactggaactcaagacactgatcaaagatctccatgacaatggtatagaagtgatcctcgatgtcgtcttcaaccacactgctgagggaaatgaattcggtccgtgcttttctttcaaaggctttgacaacaacatttactatatgttgactccggacggacattattataatttcagcggatgtggaaatacactgaactgcaatcaccctgttgtacgagacatgattttggagtgtctgcgttactgggtcatcgaataccgtgtagacggattccgttttgatcttgcttccattcttgggcgaaatgatgacggaacccctctaagccaaccaccgcttctgcgaagccttgcattcgactcgatccttggaaatgtaaaactgatcgctgaagcatgggatgccggcggactttatcaggtcggttctttcccttcctggaagcgctgggctgaatggaatgggcgctaccgtgatgatatgcgccgctttttaaaaggagatgacttccttgcccagactgctacagcaagaatcacaggttctcctgatctgtacgatcctgcttaccgaggtggaaatgcttccatcaactttctcacctgtcatgatggattcacgctttatgatttgtacagttataaccagaagcataatgaagccaacggttgggggaacactgacggagctgacgacaataacagctggaactgtggcgtagaaggcgaaacagatgatcctgccattctagcacttcgtaaacgactgatgaaaaatgcctgtgccattctgctttgcagccgcggaactccaatgttcctctccggtgatgaatttgcagacacacgttatggaaataataacccttattgccaggataacctgatctcctggctggactggagtctcctcaaaaaaaataaggatctgttcgatttctttcaatatatgatccggttccgcaaagatcatcctgtcatccgtaaggatctcgaaccaagctatcttggtattccggcaatgagcacgcatgggctcactccggatgagacaaatttctccggtgacagccatgttgtctgtgtacgattcgcaggctataatgaatcaacccaaaaagaagaccttgtttatctggctgtaaattccggatggtttccggttacactcactctgccggaacttcctgaacattacaaatggaaagttgcggtcaacaccggcgatcctaaatgtcagttttttcacaaaaattcaatgcctacggtagaatctaaaatatttttaggtgaacgctctgttattattttcgttgctaccgctatataaattaaatttttttagctgtttctcaatattttttagaatatttttgtttgtttttgacaagtctgttgattgtataattagtaacagacttgtcattttttaaacttttcttgataatttttagatttatttgtaaaatattaccaaatgtaactttactggtttgaagataggtttttcaaatacatttcctattttaaaatcagtcagtaatgaacgttatggtaaaaggagaggtttaaaatgagtagacttgaaatcccaggtccagataaaggccagctcgtcgttgaagagctgtacaaagatctggaacgtagaattgaatccagccctccgggattatgtccggttgacatgactcgtgcatttatcgagatgtgtcagacgcaatcctgtggaaaatgtaccccgtgtcgcgttgggctgtggcaactgaagaatcttctaacagatgttatgaacgggactgctacaatggagacactcgaactgatcgacacactgtctgaatctatccgcgaaggttctgactgcccgatcggatacgaagccggtgccatggtacataagagcttaagagactgtcgcgaagattatgaggaacatgtccgtcagggacgctgtacctgccactatacacagccggtaccttgcgtttctctttgtcctgcacatgttgatatcccaggatatattgcactgaccggagaggggcgttacgccgacgcaattcgtctgatccgtaaggataatccgttcccgacaacctgcggttttatctgcgagcatccttgtgaggcccgctgccgtagaaatatcgtagatgatgccatcaatatccgtggactgaaacgtatggccgctgactatgcaggcaaagttccgccaccggaatgcgcaccttccaccggaaagcgtatcgctgttgtaggtggaggacctggtggactcagtgctgcttactacctgcagttgatgggacatcagacaaccgtattcgagatgcttccaaagctcggcggaatgctccgctacggtatcccgaactacagacttccgaaagatcgtttggacgaagacattcaggcaatccttgagaccggagttcaggtagaatttggaaaacgtatcggtaaagatatcacaattcagagtctgcgccaagaatacgatgctgttcttatttccatcggtgcaagcactgataagaagcttggtatcgaaggcgagcatgcagaaggcgtgatctccgccgtatctttccttcgtgatgtcggagaaaataagagccctgatcttaccggacaggaagttgctgtcatcggtggcggtaatgtttctatggacgctgtccgcacagcaaaacgtctcggtgctaaaaaagtaagtatcgtttacagacgccgtactgcagatatgactgctcttccggctgagattgaaggtgctgttgctgagggaattgaagttctcacattgaaagctccatccagaatagagacagatgagaatggacacgtttcaggcatctacgtcacaccacagatgatcagcaagatcaaagacggtcgtgcaagtgtctgtccgacaggagaagaagatttccttatcccttgccagacactcatcgttgcaatcggtcaggatatcgaatctgaacactttgccgaagccggcgttccggtttcccgcggtaagatcatgacagaacgttatggcggtttcgataacatccctggcgtattcgccggtggagactgtgcgtccggacctgcttctgtaatcaaagcaattgctgctgcaaaggttgttgccgccaatatcgatgaatatcttggtttccaccatatcatcagctgcgatgttgagattccggagccacgtttaagcgaccgtgaaccttgcggaagagttgaacttacagaacgtgaagcctgcagccgtgtctgtgacttcgaaggcgttgaaaactgtatgacagaagccgaagcaaaacaggaatcccacagatgcctgcgctgcgaccacttcggttatggtatctttaaaggaggtcggaaagaaaaatggtaaatattacaattgataatcagaaaatatccgtaccttccggaactactatcatggaagctgcggcaaagcttggaactccgattccgaaattatgttatttaaaagatatcaacgagattgcggcctgccgtgtctgtgttgttgagattgaagggaaagatcgtctggtcacctcctgtaataacgttgtgaccgagggcatggtgatctacaccaacagcccaaaagtacgcattgcaagaagacagactgtacagcttatcctttcccagcatgactgcaaatgtgcaacctgtgtcagaagcgggaactgtacacttcagcaggttgcaaatgacctgaacctgatcgatcttccgttcaaagaacgttttgaagaaactccttgggataagacattcccactcatccgtgattcacgcaaatgtatcaaatgtatgcgctgtatccagatctgtgacaagatccagggactgaacatctgggatgttacaagtacaggttcaagaacaacgatcaatgtaaacggaaataaaaagatcaacgaagtctcctgttctctctgcgggcagtgtatcacacattgtccggtcggtgcacttcgtgagcgtgatgatacagaagacgtatggagtgcgattgctgacaagaagaaagttgttgtcgcacaggttgctccggcagtccgtgccgcgtggggagaggctctcggtctttccagagaagaagcaaaaatcggaaagatcatggacgccttgaaaaagatcggcgtagactacgtcttcgatacttctttctctgctgaccttacaatcatggaagaaggaaatgaatttctgcagcgcttcaccaaaggagaattaaagctgcgtccgatgttcacttcctgctgccctggatggatccgtttcatcaaatcacagtacccacatctggtgccacagctgtccacagccaagtcaccacagcagatgttcggtgctgttatgaagacttattttgcacagtccatcggtgttgctccggaagatatttacaccgtatctgtcatgccttgcgtagcaaaaaaaggcgaacgcaacatggaacttttctacggtgagtatgccggacatgacattgacacagttctcactacaagagagctgacaagaatgatccgtgctgcacatattgatccaaagagcctgaaagaccgcgaatgtgatccgcttatgaaagagtggtccggtgccggtgttatcttcggtgctaccggcggtgttatggaagctgcacttcgttccgcacactatcttgtaacaggacgtaaccctgacccagatgcatttaagatcgtccgcagcccatcctttgagacgggtgttgtagaggctgaagtccagattggtgatgctacgatccgtgctgctgttgtcagtggtcttggaaatgtacgcaaactgcttgaagcaattgaacacggtgaagtacactacgactttgtggaagttatggcctgtccgggaggatgcgtcggtggaggtggccagccgatccacgacggcgaagagcttgcacacacacgcggtgcaaacctctacttccttgacaagaacgccaaaatcagattctcccatgaaaaccaggatgttatgaaattatacagcgatttcctggagaaaccattgtcacacaaatcacatatgctgcttcatacagatcatacaaagtgggagatgccgagataactattcatcattttgcattctgaaataggcatcccaaaagtttcaatcagtgcaggggccgcattttccgaccgtgaaaatcctagcgaaagtattttcaaagatgccgacaaggctctgtatcacgtaaagaaaaacgggcgaaacggatgcggtttttaataaagaaaaagcaggcagaacaagattgtcctgcctgctttttctttattctactgttacactcttcgcaaggtttctcggtttatctacatcaagtcccttcgcaacacttacataatatccaagtaactgcagcggaatcactgcgagacttcccatgaaatgctcatccaccttcggaacatagactgtaaagtctaccttatcttccatctcataattgccatagtttgtcacacccatcagatatgcgccacggctcttgcattccatcatattgctgactgtcttctcatacagcttgctctgtgtcagaactccgatcacaagaatgttgtcctcgatcagactgattgttccatgcttcaactcacctgctgcataagcctcggaatgaatataagaaatctctttcagtttcagacttccttccagacacactgcataatcaactccacgacctacaaagaaaacatcatgtgcattcgcatatttggctgcgaaccactggattctctccttgtcctgaagaatcttctcgatcttgtccggaatcgtctgaagttcagaaatgtagtagctgtactgctcgtctgtgatcagccccttcaccttcgcgaactgaaccgcaatacaatccaaagccacaagctgtgcactgtatccctttgttgtcgcaaccgaaatctccggtcctgccagtgtatagaacaccttgtccgcctcacgggcaatactgcttccaattacatttacaactgcaagtgtagcaagtcctttctctttcgccatacgcattgctgccaatgtatctgctgtctctccggactggctgatcacgataaccagaccatccttcacaagcggcatctcacgataacggaactcagatgcaagctctactcgaaccggaatctgggccatctcttcaattacatactgcgcctctactccgacatgccatgcagatccgcacgcaacaatgtaaatctggctgtacttcttgatctcttcctctgtaagatcaatatcagtaaaatcgatcactccgtcttttacaactgaattcagagtatcacggattgctttcggctgctcatagatctctttcatcataaaatgctcaaatccagccttttctgctgcctctgcatcccatttgatctctgttgtctctttctcgatctcatcaccgttcaggtcatagaaatgagcctcgcccggagtaagtttcgcaaactcaagatttccgatataatatacatttcttgtatatttcagaatagctggaacatcagatgccacataggtctcgccatctgcgataccgatgatcatcgggctgtcttttctagcaacccagatctctccaggataatccttgaacatcaattcaagtgcataagaaccacgtacacgaaccattgtctttgcgatcgcatcgatcggtcctaaattgtatttcttataatagtaatcaaccagcttaatcactacttctgtatctgtatcactgtagaatgtataaccatgctttaacagcttctctttcagctctgtgtaattctcaatgataccattgtgaactccgaccacttcagactccacggtacccggaccacttttctcacagtttcctgacacatgcggatgtgcattcacctggctcggctcaccgtgagtcgcccagcgtgtatgaccgataccacaagttcccttgagtgccttaccactgtcagtcttctctgaaagattgctcaaacgtcccttcgccttaacaacctgtgacagatgctctccgtcacgcactgcaagaccggctgaatcatatcctctgtattccaacttggacaatccgtccaacagaatcggagctgcctgatgatttcctgtaaatcctacgattccacacataaataattcctcctattaactatctgtatcccactctacaaatagttatatgcatttccatgttgttttcccttttcaatgagcctatcactttcgtaattgttacaaaaaagttaaataactcattcgttagtgtaacacagataggcgaaatagggaagtaaaaaatgcattttcttaatcgctttccattgctacattggccagtcaggaaaccttccgttcatgattgcatgcataatcctctccttcgcccctggtgtctccctgttgatctgctctattagctgttttgcatacgctctttttgttgagccgtctaccgggcaggtattcttaaccacacggattccctggtctgcaacaaaatgcgctaccccctgctccggaacatacatcatcggacggatcaccgtcactccggcttccggtaattctgtcaccggtggaaatgcatagaatcgtccttcatagatcaatgacatcaatgctgtctctataaaatcatccttattatgtgcatatgccatcttattgattctaagctctcccagtcgttgatacatcgcacccttccgaagttttgcacacaacgaacacggccttacatccttgttttcccgaaatacgatccgggcgatctctgtatcgacctgctcataaggaatctccaagtgcttacaatactctgctacacccgtaaaatccattccttcaaatcccacgttacaggtaatggcggataattcgaaccgcttcgggtaaaatccttgcagcagtttcattgcatacagcaatgtcaacgagtcctttccaccggaaacgcctacagcaatcctatcgccctcttctatcatgttataatcttgtattgcctgacggatcaggcttaataatttctgttgtttcatatttccttcattttttctttcactttatccggtacatcgatcagtccaaatcgataaaacattccataaatgtaggtaacgcccctgatatctccaagagccttcggcctttccactatttctcctgtctgctttatattatgaaacgccagcttcaccgaactccaggccagacttttacttttttccctgcggttgatccataattctttcgtatattcaccatttcttccttttctcacttcataggtgaacggcaaaccggaatatgttttaaacattatattttgataactgaggatcatatcccataaatgctcttcactcggttcttcctgcagtcttctcattaaatcataattcatatcagaagctttcctcaactactactttgcatctttctatgctcatcacataaccttccaaatattagtttcataatatcacttttccataatactttacaacaattttgcgaaattcgggttgcggattttgtaagcatctcttatactttattattatgatgtaggtgcgggaattgcatagcaatggagcaatccggttgcatcagtgagtggaaaaattttactttttgcactcacaccttattatgtatgaatgtggagggatgaaagcatgaagatacttctgatcaacgggagtcctaaaggtaaaagaagtaattcattaaagcttgcatacagtttcattgaaggatttaaaaatggatgtacgaatgatgaagaaagcctctccatcgatgaactccatgtagcttcaatgaatatagctgcgtgtaaaggatgctttgcgtgctggcagaaaacacctggcatatgctgtatcaaggatgatatgcaaacggttattgaaaaactgattgatgctgatcttattctttggtcttttccactgtactattttaatgtcccagctatcttaaagaatttgatcgatcgtcagcttcctatgagtcttccttttatgagttcaaagcaggacggatacggaagcggaagtcatgactccagatatgatatggaaggtaaaagacatgtgctgatctccacctgtggcttttattctgctgttggaaactatgacagtgtattgcggatgtttgatcattttctcggcaaaggaaattatacgaccatcttttgtggtcagggagaattattccgtgtaaaagaattgtctgcaagaacagatgaatatctttccactgtaaagtgtgccggctcagaatatgcaatgactggaacaatttctgaaaaaacagatacaatactccacacgcttttatatcccagagatgtgtttgaaaaaatggcagatgccagctggggcattagtaaaacgaccggagaaaaggaaccggatgatcttgtatttacccggcaaatggcctctctttataacaaagacagctatgatggaaaagaacgcgtacttgagatacactttaccgatttgggacacacctaccagattcagcttagcaagactggaagtgaagtttttactgacggacgtctttctccaactactcgcatagatacgccttttactgtatggtcagctatttcccgtggagaaatcggtggcgcagaagcattggggaaacagatgtatacggtatccggtgacttttccttgatgattgattgggataaattcttcggaagcgcatctgtagtcaaaaaaacagagaaaacgcctcaaaatacgattgaacagaaaaatccttccatgatgacaatgcttataccgtggattacgttctggattgctgtttctattcatccggaagtcggagctgtgatcacactacttgtggtcgcaacagtaccatttattatgcgaaatcgtaaatttgtaatttgggatcagctctctatggcagctgttgctatactttctgcagccgcaaatataaccggaaacggagttcttctgacaaacatcggatatcttgtatttggactattctggctgctttcatgcctgacaaaagaacctttatgcgctgcgtatgtaaaatataattatggtggtgaaagtgcacaccggaaccctctctttatgaaaacaaattatattcttgcagcagcatggggagtgttatatgtgctgacagcaatctggacctttctgcttaagaaagccggacttggaaatgtgcttatccttgtgaataatctgattcctgtattgatgggacttttcacagcatggtttcaaaaatggtatcctgcacggatggcaagaggcaagagaaaatagtattttctcttgcgctttcacagatttcttcttctaccacttcagccgcttccttattctctgcactgaccgagatatacatcttcaacttcggttctgttcatgctcaacaactgcataatcgagcatcctcctcaatcaaatggtgtcaatacgaaccgtgttagaaatagacgcacggcggacaatcccatgaacttcatatcccttctcccgaaggaactccgcaagataagaaccatcctgacctgtattacctgtaattaatgtcttttacattatccccttcataggagatcaaagaacgtattccaagtcccctgtcaaaaaatatttcatcttcttcagaaaattccacgcttccgagatatcccttatatcccataaattagattataactcaaactctttcaatagcttttcctgatactccttatcaactgccgctttcaatatatctgctgtacgcccgagttttgataattcaatatttaactggttaattctgttttctccttctgttattccaatcttgcgtcct

SEQ ID NO: 29 - DNA, 594 bp, Mediterraneibacter lactaris
tcggtgccgcagccaacgcaataagtagtccacctggggagtacgttcgcaagaatgaaactcaaaggaattgacggggacccgcacaagcggtggagcatgtggtttaattcgaagcaacgcgaagaaccttacctgctcttgacatcccggtgacggcagagtaatgtctgcttttcttcggaacaccggtgacaggtggtgcatggttgtcgtcagctcgtgtcgtgagatgttgggttaagtcccgcaacgagcgcaacccctatcttcagtagccagcggtaaggccgggcactctggagagactgccagggataacctggaggaaggtggggatgacgtcaaatcatcatgccccttatgagcagggctacacacgtgctacaatggcgtaaacaaagggaagcgaacccgcgagggtgggcaaatcccaaaaataacgtctcagttcggattgtagtctgcaactcgactacatgaagctggaatcgctagtaatcgcgaatcagaatgtcgcggtgaatacgttcccgggtcttgtacacaccgcccgtcacaccatgggagtcagtaacgcccgaagtcagtgac

SEQ ID NO: 30 - DNA, 601 bp, Mediterraneibacter lactaris
gggggaaaccctgatgcagcgacgccgcgtgagcgaagaagtatttcggtatgtaaagctctatcagcagggaagaaaatgacggtacctgactaagaagccccggctaactacgtgccagcagccgcggtaatacgtagggggcaagcgttatccggatttactgggtgtaaagggagcgtagacggagcagcaagtctgatgtgaaaacccggggctcaaccccgggactgcattggaaactgttgatctggagtgccggagaggtaagcggaattcctagtgtagcggtgaaatgcgtagatattaggaggaacaccagtggcgaaggcggcttactggacggtaactgacgttgaggctcgaaagcgtggggagcaaacaggattagataccctggtagtccacgccgtaaacgatgactactaggtgtcgggtggcaaagccattcggtgccgcagccaacgcaataagtagtccacctggggagtacgttcgcaagaatgaaactcaaaggaattgacggggacccgcacaagcggtggagcatgtggtttaattcgaagcaacgcgaagaaccttacctgctcttgacatcccg

SEQ ID NO: 31 - DNA, 611 bp, Mediterraneibacter lactaris
  misc_feature (610)..(610): n is a, c, g, or t
aacgagagtttgatcctggctcaggatgaacgctggcggcgtgcttaacacatgcaagtcgagcgaagcacttaggaaagattcttcggatgatttcctatttgactgagcggcggacgggtgagtaacgcgtgggtaacctgcctcatacagggggataacagttagaaatgactgctaataccgcataagaccacagcaccgcatggtgcaggggtaaaaactccggtggtatgagatggacccgcgtctgattagttagttggtggggtaacggcctaccaaggcgacgatcagtagccgacctgagagggtgaccggccacattgggactgagacacggcccaaactcctacgggaggcagcagtggggaatattgcacaatgggggaaaccctgatgcagcgacgccgcgtgagcgaagaagtatttcggtatgtaaagctctatcagcagggaagaaaatgacggtacctgactaagaagccccggctaactacgtgccagcagccgcggtaatacgtagggggcaagcgttatccggatttactgggtgtaaagggagcgtagacggagcagcaagtctgatgtgaaaacccggggctcaacng

SEQ ID NO: 32 - DNA, 438 bp, Mediterraneibacter lactaris
ggggaaaccctgatgcagcgacgccgcgtgagcgaagaagtatttcggtatgtaaagctctatcagcagggaagaaaatgacggtacctgactaagaagccccggctaactacgtgccagcagccgcggtaatacgtagggggcaagcgttatccggatttactgggtgtaaagggagcgtagacggagcagcaagtctgatgtgaaaacccggggctcaactccgggactgcattggaaactgttgatctggagtgccggagaggtaagcggaattcctagtgtagcggtgaaatgcgtagatattaggaggaacaccagtggcgaaggcggcttactggacggtaactgacgttgaggctcgaaagcgtggggagcaaacaggattagataccctggtagtccacgccgtaaacgatgactactaggtgtcgggtg

SEQ ID NO: 33 - DNA, 192886 bp, Mediterraneibacter lactaris
  misc_feature (456)..(456): n is a, c, g, or t
aaggcgtcagactctggttccggacgaaacgtccggcttaccgtcaactctgccttaagctggttgcttaaatagataaaagaatagttctcccaaagtccggttcaggcggggcttatttcagtgcctctaatcccaaacctgtcactctatctcattcaaaagtttgacagattggcactttgggggaatttaactattttagaattacattttgcggaaactcaagtcagtttcatttttcaaaaacttatatgaatttatatgatgccaggttcaaaaggtctaagcccacatgagcttgctcataggtgggtgaaagaccttagaacctgccccgatatgagcataaaagtgggatgataatcccacgatatgcgaatattgggtaggattgtgggagtgcgtagcacggagcaatccgtaggcatcaaagtcgggggcttttgcccccgngccccgatatgagcataaaagtgggatgataatcccacgatatgcgaatattgggtaggattgtgggagtgcgtagcacggagcaatccgtaggcatcaaagtcgggggcttttgcccccgacatcatttatatagagttatattcagactgaaaattaaaaatagcaccttcagaaagatctgcttctttccgttggtgctttatttattacagtcttaagtattcacttggtaaaattgccttcatatctgatgtagaataatccgacacatttcttgtaacaatatattccgccccataactctttgcacattccatttgtaagcaatcctcaaaatcagaaaattcttcattcgcaagacgatgagaactatgtttttcgctgtcatggaaaagatttccgagagtgctttgagcaatttgagaaagctaccatttttgacggaatgaccatctatgatgcggaatccgaaatagaagttctttttggctaagggaatggccacatctcatgcagtttaaataaccgtctgctgatccagccacttgccgaacaactcacgcttgatcataattcttttaaaaaatggcgaagtgcttatcgtaacacttcgccgaaagcctaaccgatttgagctaaatgcttggttaggtctgctttattattttatgcaattccactgcatttatacacttaaatgttctttccaatccgccggaagattcattgctgcgaaactgaccacatcactattattttgaatcaacttatcgaaagcatttacaaatactgtccactcttcatcggatgaacgcaggtacttcatcgccagtaagatttgatacaagccattatgtgctggtggcggcgtaattttatctgcatccagaatttccggtgtcgtatgaattgtacgattataaattctggaattatgagcacacatattacgcaatactgaaacaccctgtatccatgaagcaagcattttctgtgatggttttaccaaatttccttttttcgatctatactgataatttgacgccaagatagaatatgaacttccggtacctgttttcaaattcttaattatcttcgataatgtaccgaacgaaagaacttcaacggccgcccatacaggtacttctccatcatgattgtcaaaattatgtttgatgaacacatcattagaacgagcaatttctgatgctacagtagccatattctgccaataccgttttttctctttaaaaatcgatgaatcttgcaaaacaagtggttctccgtgtataagcaatgcttccaccaatcgcactctcaaagcaacctcaatcttagaaatcattggaaaaaccaaagcagataattcctgatcaaattgatacaattttataatatcttcaaactttgttcccgaaacatacttctttgcagcattatcatataattgaaacgaataacctctcaaacgataaaatccaattgacttcaatgccttctctacatcttcttgagatgtaatcttcattcctgcatccacataagattgcacctgctgttctattgttaatatttgttttggatattgatacataaaacaccccataaataagaaagtcccaccgggttgcgcatgaaaaatcagaggcgtggtgggttctgttaatgttattatacagctttcaatgccactgtcaagattgtttttgtaaaaagttgcctcgcctcgactaatccctggtctccatcagaatcacttttccacatacaaaagaaatcttcacttcatcttctgcaaattcattactcacacacagactgtcccctgcagaaagcagatgattctgcaacgggtattttgctccgctgatactgaaatcttctacaggaagttccagtggaaatacggaaaaatattttccaaaagcttccgctctcgtcagcgtgatcccatgctctaaaatccggatccggttatgactgtccaggatcattgcctctgaacctgctgccagtgcaatattcaggcactggatattcgcccagagatgatcgatccggtttcctgttcctccaaggatataaatttcctttcttctaagtcccaggcataaccggagtgcgatttctgtatcagaagcatcttttacaggattaaactcccgaattggtacattttcctctgtccggtaatattccacgatctctcttgggacgctgtcgaaatctccgacaatataatccggtttgatctcattttcgtataaaaactgaagtcctttatctaccccgataataaactctgtctcctctgactgaaggatcggaagtacaaattctttttccaggattcctccgctcacgatcacagttctcttactcatgactctttaatatctccataaattcttctgtattttttctgatgtctcccttaaatatgcctgaaccggaaaccataatatttgctcctgcatccaatacttccgcaacatttgcatggtagataccgccatccacttcaatatctgtcttcaatcccttttcatccagcatttttctcagttccctgatacgatccagtgattccggaataaacgcctggcctccaaagcccggctctactgacatgaccaggaacatatcagcctgatccagatacggaacaaatgcctccaccggagtttttggcttaatcgaaatccccgccttcacacctgctgcatggatcttgtcgatcgtcgcctgcagatcttcacatgcctctaaatgaaccgtgatgatatccgctcctgcttttgcaaattcttccacatagcggatcggttctgtgatcatcagatgtgcatccagtatctgcgaagtatatcctttgatacaggaaagtaccggcattccaaaagaaatacttggtacaaaaatcccatccattacatcaaaatgaatatattctgctcctgctgcctctgtcactttaagctgctctccgaggactttaaaatccgcagaaaggatcgatggtgctaacacattcttcatttctaatacctcttcttttcttttaattcacgatacatctctgtataatcttcatagcgtatcttatggattgctccgctctctactgcttctttcactgcacatcccggttcatgaatgtggtcgcagccgttaaacctgcattttccttcatacggagaaaattccggaaaataatatttcagttcttctttttcaaaatcattcacataaagggaactgaatcccggtgtatccataatataggaatccggactgatcatgatcagttcggaatgcctcgtggtatgctttcctcttgcaatttttctgctgatacttccggtttccatctgtacgcctgactggagcagattgatcagagaggactttcctactcctgacggacctgcgatggaagtcgtctttcctttcagcatctgctttaatttttctatattttcttctttctttgcactggtaaacagcaccggatagccacaggacgcataaacttcctccaattctgcaatctcaggatgttctgcaagatcggtcttattaaaacacaaaatgaccggaatctctttccgctccatcataaccagaaatcgatccagcagattgtagtgcggctttggttccgttaccgcaaatacgaccagtgcctgatctatattggccactgccggacggatcagttcatttttcctcggcaggattttcgttacatttccgattttttcttcttcatccaggacttccagctccacttcatctccaaccagtggtttaatgccattcttcctgaatgacccctttgctttacattcataaagaccggattctactacattcacgtagtagaatccggcaattccttttataatctttccctgcatatattactgctctctgctttactctgtaccgtcttcaccggatggatccgatggctgtggtcctttacttaccatatactgaatggaagttccctcttccacctgggttcctgcactgacagactggtaaaatacctgtcctttcggataatcatcactgtagtcttctccaagatattcggctgtaagacctgcctgctggagcaacttctctgccgtcgtcttattagaagaaaggatattcggtactgtagtcactttcagctttggtcctttacttaccacatagctgaccgttgctccttttgatacctgctttccggatgccgttccctgtgaaatgactattcccgctgctacagaatcactatattcttcactggcacttccctgaagtcctgccgctgcaagtgctgactcagcttctgactggctctttccttcaatggacggaacagttgccggctgtgaaccaagactgacaacgatcgtaacttctgatccttcatccacttctgtaccctcacccggttctactgaaataacttttccttcttccactgaatcactgtactgcggatctccttttacaacaacaagattcgctgctttgatggcggcctctgcatccgattcatcttgtccgatgacagacggaactttggtactctttgcctcctcaccggtactgagaacaacttccacggtactatgccgcttcaccttctcccctttccccggtgactgactcatgatctgattctttttatattcattcgatggctttttatctactacatcgattccaagatcatactttttcagctcttttgtagcttcttctactgtcatgccacggacatcaggcactttgaccttctccgactgagtgacggtcgcattccccgaacctttaaagattccgactgcatttccgacaaggaacaggatcagcagtgcgatcactacacctgccacaatcatcagaatccgcatgatcttctttgtatcaggatttacatccttcttttttcctcttcctgaagaacggcggtcacgttcatcctcgtcatcttcatcgtcatagtcatcatcatactcgtcgtcttcatcgtcgtagtcatcatcatactcgtcgtcttcatcatcatagtcttcatcatactcatcgtcctcgtcataaccacgctcccgctgaagacgttctacttcttccggtgacataacaacagtccggtcacttctccgtctgcccccaaggacaacaaaatcgccttccgggtcaaccagcgagtgcttcagatcctgtaacagctcatcgcagctctgatatcgcatcgccggatttttctgcgtacatttcataatgatacattccagactgtacgggatatccggtacttcttccgccggagacttgatttcctcctgcaggtgcttcaacgccactgtcacagtagaatccccatcaaacggaacatgaccggtgatcatctcatacatggtaatgccggcagaataaagatcactcttctcatcgacaattccgcctcttgcctgctccggtgatgtatagtgaacggatcccattacactggtgctgatcgtttgcgtagacgtagtcgcccgtgcaataccgaaatctgttacctttacttttccttctttcgaaataataatattctgaggcttgatatccctgtgaataatatgacagttatgtgccgcctgaatccccgtcaccatctgaattgcaatgctgatggtctccttggctgaaagctttccttttttctcgatataatctttcagcgtaattccttcaaccagttccatgaccatataatataagccacgatcctgtcctacatcataaacgttcaccacattcggatgcatcagtcctgcagccgcctgtgcttcgctcaaaaacttcttaataaatgtctcgtccgaacggtaatcgctcttgagaaccttaatcgcaacaaaacggttcagcttatggtcttttcctttatatacatctgccatacctccggaaccgatacggccgagtatctcgtaccgctttcctaagaaaactccttctttaatcatatactcacctcatctgcaaatggttcgatcagaacgattccaatattatctgtaccgccgttctctttggcagcattcacaaggttctgccctgcttctacaatgtctcttgctccctgtacaatatggaaaagttcttcatcttccaccatattgctcagaccgtctgtacacatcagtataatatctccccttttcagacgatgctcgtaaaaatctacatcgacatctgcttttgccccgatcgccctggtaataatattcttatccgggtgatgctttgcttcttccggtttgataccgcccagacgtaccatctcttctaccagtgaatggtctttcgtcaactgctgtattccgtgattgatcagatagagacgactgtctcccacattcgcaaaatacatcatctgattcatgatcgtagctgctacgaccgttgttcccatccccttgagatgttcgtccttcgatgcctcccggatgatctcccggtttgccgtcttaatagcatttacaaggactctctcgatatcttcgccctggcttttctccagctcacgctgcaatacttccacggtatacttggaagcatagtcgcctgcctgatgtccgcccattccgtctgccaccacaaacagattccgaaggataccaagtggtcttcctccttcaaaaacgtaatcctgattcacctgtcgtaccattccgacatccgttattgaaaatgtcctcatacttcttctccttctgccacatccgcctttacatagctgcgtctgagctgaccgcaggccccatcaatatcagagcccatttcccttcttatagtaacatttattccgcttttttcaagtttatttttgaaattcagggcatttttgcggcttgggcgtacaaaatcacgctctcttaccggattcaccgggatcagattcaaatgacagtttctcggctttaaaagtgccgtcagttcccttgcatcttcctctgtatcattgactccatgtaccagactgtattcaaaggtcactctgcgtcctgtctcacggaaataggtatcgcaggcatccagcacttccgggagatgatatttatttgctaccggcatcagcctttttctcttttcctgcgtagaaccatgcagggataatgcaagcgtgatctgtaaatgttcttttgccagttccaggattttcggaacgatcccgcaggtagatactgtcacatttctctgactgatattcaaaccgtgttcatccgtaagcagatgtacaaaattcaggaaattttcgtaattatccagtggctctcccgttcccatgactaccacattggatactctttcctgcgtgatcttctgaatctgatagatctgccccagcatctccgaagaagacaggtttctctgcagacctccgatcgtagaagcacagaatgcacatcccatccggcagcctgcctgtgaagaaatgcagacggaattaccatgcttataacgcatcaggacactttcgactacatttccgtcatataactggaataagaatttattcgtcccgtcaatctgcgagatctgacgctccagcattttcaccggaaggatcacatactcctctttcagcttttcccgtaacgcttttgacagattcgtcatctcatcaaaatcatctgccagctttacatgaagccattcataaacctgctttgcacggaatggtttttcccccagtgcctccatctcttcttttaatctgtcgtatccataagcccggatatccttcttcatatcagttctccccgttcttttttaaccttgctataaaaaatccatcactgcaatgtatacccggaagtaactggatgcatccttcctcttctaccgactctgccagttgcgggcaaagcttctctctgatactgttcagagaaaactgcgggtactttttcaaaaaccagtgtacattctcctcattttccatggggtcgatggtacaggtactatataataatgtacctcctttttttaccattgcctgtgcattttcaagaatctttctctgcagtccagccagttctttcaggtcttcctctttcacccggtatttcagatccggtttctttccaaagactcccagcccggaacagggcagatctgcaaggacaatatctgctttttctttccatgcttcatccggtacggttgcatccctgcagaccgcatgaatattttcaagttccatcctggcaatattttcttcaatgagtcctactttatattccgtcagatccctggcttctacttcgccttttttcgcttcatttcggtcagttatccacagtttctccgcaatatgtaaggattttccacccggagcagcacagatatccacaattttattccctgcttccggggctgccagctctgccaccagcatagaacttacatcctgcacagtaaaacagcctttccagaagcagtccaggctttcaagataatcatatccgctgatgaaaaaggcgtacggcagataaggatgctcctgcacagttaccccttcctgttccagttcctttttcagttgctccgcagttactttattctgacagcaccggatcgtgaccggcctttctttcaggaaatcggctgccatggtacgggtgacttcctccccataacttttttcccacagcctgagaatccatgtcggaatagaatattggattgaaagtgcctcaattccttcctgcggatagtccaatgtatccagtcctcttgccacactccgcagcactccgttcacatacccctttaatcctgaaaagccttttcttactgccagtttgactgcctcgctgcacaccgcatgatccggtacgctgtccatatattttaactggtaaactccgcttcttaagatattgcggatcaccggtttcatcttcttcacttttactttcgagaactgatccagaatataatcgatctcaatcagatgctccagcgttccctcggtcaccctggtaataaacgcacgctctttcttctcaaggtattgatatttcgacagtacctctccgagaattttatggctgtatgctccattttctgttatttccatcaatactgcgagaacgatttcccgctcattgacctgtctgcccatctttttcctccagcatttctgttctgcactttaatcgtctctgcgtcctcttgtaaggatcagaagacgtaataactgtaaaatctgtgccgctgcacttgccacatacgtcagtgccgctgctcccagtactttcttcacaccgctgatctcttcaggatgcaacattcctgccgtctccagaacatttactgcccggtgtgacgcattgaactctaccggtaaagtcacaatctgaaaaaggactgccagtgagaacaacaggattcccagattgatcagcattgcggacatctgcccgttgaacatcagtccaataatgatcaatggccacgagatcatagaaccaaaatttgccgccggcactaaagcagaacggacagaaagcggtgcataccctacctgatgctgcactgcatgaccacattcatgtgctgcgacaccgattgctgcaacggaagtcgaatgataaaccggatctgataatgccagtgtcttgttcgttggattataatgatctgtcagatttcctgaaatatggatgatctgtacatcataaatgccgttccgatgcaaaatcttttctgccgcatcccttcccgtcatgcctgaataactgcgtacattagaatatcttgcaaacgtgctttttacttttgccgatgccaaaaggcttaataccacaccgatcagtactaatatataagtccagtcataataatagtagaacatcttctctgcctcctgaatttaaattctgtccattttcctgctctatgcttctgttgtaaatacagttcccggcttcaggctatatcctcttaaaaatgcatccgcatccatccgctttttccccggaatctgaagctgcagcaccttcagtcgtccttcacctgtctgtactgtaaagctgtctttttccactgcaacgacagttcctgccactgtctgtgattctccctgaaacttttctgtctctgttccgcctgcctgcacacccgctcccggctctgctttcgctttccagatcttcatcacctttccgtcccagtgagtataggcacttggccaggaatttaaaccacgaaccagccgttcgatctcaacggcagatctgctccagtcgatatttccaagctttttatccaacatccgtgcataagcggtgggactttctccctgcttttcaaaggttgctgtatgtgtttccactgctttcagcgtctccacgcataatgccgcacctgcagctgccagtttatcatgcagtgactcaccggtctcgtccggtgtgatctcaacttccgtcttctggatcatatctcctgtatccagtccttcatccatctgcatggtcgttactccggtcacactttctccgttgatgatcgcccactggatcggtgctgcaccacggtactttggaagaagtgaggcatgcacattgatgcacccacatggtgtcatttccagaattgactttggaaggatctgtccaaatgcaatcacaaccataacatctgcctgatattttcttaattcttccacacactcaggatccctgatcttcttcggctgatacaccgggattccatgcttcattgccgctgctttcaccggtgtgggctgcatttctttgcctctccccttcggcttgtccggctgcgttaccaccagacacacttcatgtcctgcttcgatcagtgcctccagcgttcccactgaaaaatccggcgttcccataaagataatcttcatcatgatcctccctttttttattcttctctgcaatgtctgtatttcagagattttcagtcttccggttcctccaccggttctacatcatgcagtccgtcttccaccttatccacataaagatgccctgaaagatgatcgatctcatggcagaatgctcttgcaagaagtccttctccctcgatttcaaattcttccatctcttcattcaatgcccgcactttcacataattcggacgtgtcacaatgccccattttcccggaacactcaggcatccttcttctccggtctgctcaccggaagtctcgatgatctccggattgatcagtacgatcggtccctcgcctacatcgatcaccacgatccgcttgaggattcctacctgtggtgctgccagaccgactcccatcttttcatacatcgtatccagcatatcaccaatcagaatctttgtcctgatggtcattttttttacttctttacactgctttccgagaatttcatccccgatttttcttacttctctgattgccataaccttctccttcttaatcttaccttaatttctcttttattctcacaggttcatcggattaaaatcaaactggatcctcagctttgcaaagcctgaattgatctcaatatactgctccatcagatcttttacccggatcagcgttctgtattccggtgctttaatatagattacccggcggtaaatatctttaatcttatctactcccggacttgccggaccgatcacttccagtggtgcttttcctttgatccttaagacatattctttcaaatatttacacccagtctccagaagccgttcatcttctcctgctgccagcacagccatcagttcttctgccggaggataccccagcagctccctgtaccggatctcctgctcataaaaagctttataatcctgtgccgcagcagctttgattgcataatgctccggggaataagtctgaatgaccacttctccctcccgcatccctcttccggcacgtcctgctgcctgcgtcagcaactgaaaggttcgttcccctgaacggtaatcatcggtatacaatgacatatctgctgccagcacccccaccagcgtcacattcgggaaatcatgtccctttacgatcatctgcgttcctaccagcacatccgcctcttcattggcaaatgctgaaagaatttttgtatgtgcatctttctttttcgtcgtatccatatccatccgcaggacttttgcctgtgggaaacgtcgtctcaccatctcctcgatctgctgcgttccggctttaaattctccgataaaaccggacccgcactccgggcagacccgaatcttcggctgctcatatccacagtaatggcagaccattttccctcctttatgaacggaaagggatacattgcagtgtggacactggatcacatgtccacactccctgcaggacacaaatcccgaatatccacgccggttcaaaaacagtatgatctgctctccccgctccagccgctcttccatcagactttgcagcttcccgctcaggatcgtatgattcccgttcttcagttcttcccgcatatctacagtatacacctttgccatctgctgcattctggaacgatgccgcatttcatacagaacatactcacccttcctcgcccggtacatcgcctccatcgagggcgtcgcacttccaaggacaacgcttgcatcctcttcttttgctctctggatcgcagtttcccgtgcatgatacctgggaatctgctcacttttgtaagtcggctcatgttcctcgtcgatcaccaccagtccaagattcggaaatggtgtaaacagggcagagcggggaccgatcatcacatcgatctctccccgctttgcacgcatcatctgatcataacgttcccccgcagaaagcctggaattcataattgaaacccggtctccgaacttcctgtaaaaccgcatgacagtctgatacgtcagtgcgatctccgggatcagaacgatcgcctgtctgccatgttccacaaccgtatggatcatttccatataaacttccgtcttgccgctccctgtcactccatggatgagatatgtctttcgctttcccgccagataatcctcacggaatccccggattacctgctcctgttctgaagtaaaggtgatggttcgctcctgctgcgttccctgctgcaccggattacggtagatctgctcggattcgagcttcagtactccctgctcttctaacgcacggatcaccggcagggtaatattcagctttccggtcaccagttcataatctaaaagccggtctgcaagcaatgcttccagcagtcttgcccgtgccttctggttcttttttctataaaatgcaagcttttcttctccttctttttccgaaaggagaagccgtaaatgcttctttacctttgcattctctttctgcctgatcggcagaacggtcttgagcgactggatcattgtcccgccataatgctctttcatccatgccgcaagagcaatcagcctggtctcaatctccattcccttttcagaaatagacaggatggatttcactttggaaaggtcgtattcgcatttttccgaaaaacctgtcacgtatcctttgatctgccggtttccttttccgaatggcacaaccacttccattcccggttgaagtcttgactccagttcttccgggatgcggtactgaaagatcttatccagtttttcatgttgaatatctactattacatctgcaaacacgcttttcctgccacacttcctgcttattttcggttctgactttttatcccgattttactgccctgcttttattcaggacctacttattctgatccttctcctgcttttcttctttcagttcctcaagaacttctgcaatcaggactctctcatccatcggatatttcacgcctttgatctcctgataatcctcatgcccttttcctgcaagcacgatcacatctcccacttcaccgtgactgatggcatacttgatggcctccttacggtcacagatctctacgtattttccattggtttttccaataccggtcttgatatcatcaatgatcgcctgcggctcttcaaatctcgggttatccgaggtaatgatcgtcaggtctgccagtcttcctgaaacctctcccatctcaaaccttctgtctctggaacggtttcccccgcatccaaataagcataccagacgcttcggatgatattctttcaatgtggtcagaagactctccagactcatcgcattatgagcataatcgatcatcagcgtaaaatcatccgacactttgaccatctcaattcttccctttacctttgcctttttcagggcatctttgatcagttctgccggtacttcaaaatgtctgcataccgagatcgcagtcagagaattgtagacgctgaacgttcccggagtgtcgatctcaacatcaaactccatcactccggctacatgatatgccactcccagatatcccggtctggataccagccgcacattttctgcacgcagatctgccttttctgaaaatccaaaggtctccactttacaggttgcccctgagaaaacatcctcaaaatactggtcatccacattcgcgatcccaagtctgcactgcttgaacagaagtcccttacatctcttataatcttcaaaatctttatgttcattcggtccgatatgatctcttcccagattcgtaaaaataccgatctcaaacggaatccctgctgtcctgtggagcatcagtccctgcgaagacacctccatgaccacacagtcacatccttcttttaccatctctgcaaaatactgatggatcgtataggactccggtgtcgtattggccgcagggatctttttctctccgatgatcgcctcgatcgttccgatcagcccgaccttatgtcctgtctcctccagaatagacttgatcatataagtggtcgtcgtctttccttttgtaccggtaattcccacaatcttcagcttctctgccggatacccaaaatacgctgctgacatcagtgccagtgcatatctcgtatcttcgactttaatgaccgtcacatctgccggcacttccacatctttctccacaactaatgcagccgctcctttttctgcaacttctgccgcatacttatgaccgtctgacactgcaccgctgatgcagacaaaaacagacccgttctctacttttcttgaatcattgatcagggttgtcacttccgtttctgcacttccctgaaccactttatattccaatcgctccaataatgtatctaatctcacaacgcttccctccttgcatagactttcactgctatagcataacataatttttctttatgtgccactttttctcctgcctctgctgcccacactgcctgtgccgggcaatgcatttttctgctctcactttttcttcggacggtacagagttccttttataacagtatctttcccaaaacggctgttcaattcctccagtgccgctttcagtttcttatgcttttcatccggttcttccggtggcttcaggtcaaaaagggtcaactgctccggtgcggactcttccaccaacttagaagtcctgatccccagcagtcttaccggctctccgctccataactcctgaaataatttccccgccttttcaagcagtacctccggctgtgcggacggcttttccagctgcatctgatgcgatgcattccgaaaatcaaaataccggatctccacactgagcattccggcttttttccctgctttcttcaatcttatgccgacactctctgccagattcttcagcactttttctgcttcttcataggtgactgcatcttccgccagtgtcgttgaatttccgattccttttgcctcatccggtacagactgcacttgatcatctccgatcccgttggcgaactcccacagcatacgcccatgacttttcagatgaagctcgatcagtgcctcctctgaccttgccaggtcaccgatcgtatttatctccagctttttcagtatttccacactggatctgcctgccatatacagctcactgaccggaagcggccacatcttctgccggatctcatccgggaaaagggtatgcgtcttatccggtttttcaaagtctgaagccatctttgccagcagcttattctctgaaataccaatattcaccgtaaaaccaaacttcctcttcacaccctccctgatccattcagctcccgcctgcggagacggaaatctgtctgcgatctccgtaaaatccatataacattcatccacactgacctgctcaatctcctccgtaaatgaacgcagatactccatcagtctccggctcttctcatgatacattttatgatccggtgctctcatgataagattcgggcatttccggaatgcatttacaaccggttcccccgtcctgatcccgtacttttttgccgacggagactttgcaaggacaaccccgtgacgggacttctgatccccgccaatgatcgcaggaatctgccggagatctactttccccccatttttcagctcctctactgccgtccagcttaaatatgcagaatttacatcaatatgaaaaattattttccgcatagaatgctccccttttatatgatagtcagatatctttcatttcttgtatacattaaaaatccccgtgatacagtacttttattgtaccataccacggggggcttttcatctctttcttctttgctctcttccgactatcaatttatgccgtccagcttatccctgctttaccacagcctccagttttccatctctgacatcgatcagaattgtatcaccccgaccgacatttcctgcaaggatcagtcttgctgcaagcgtctccacatttttctgcagataccgcttcagtggtcttgcaccatacatcggatcgtatccgccttccactacaaaatcttttgcagcttctgtcagttcgatctgaagttctttttcttccagccgacggtttacatctttgaccagcagatcaataatcgagcggatattggtcttcgtcagtggcttgaacataatgatctcatccaaccggttcagaaattccggtctgaaatgagctttcaggtcattcattgtcatttcctgacactgttcgtcaatagatccgtcttctttgatgccctccaacagataatttgctccgatattggaggtcatgatcaggatcgtattcttgaaatcgaccgtgcgtccctgagaatctgtgattcgtccgtcatcaagtacctgtaacagcacattaaagacatccgggtgggctttctcgatctcatcaaaaagaacaaccgaatatggttttcttctgactgcttctgtcaactgtccgccttcatcatatccgacatatcccggaggagctccgatcagtctggacacggaatatttctccatatactcactcatgtcaatacggaccatattattctcatcgtcgaacagactctgagcaagtgcttttgcaagttccgtcttaccgactccggtcggaccaaggaacaggaatgaaccgattggcttactcggatctttgattccggctttggaacggatgattgcctccgttacaagttctacgccttcgtcctgaccaaccacacgcttatgcagttcatctgcaagatggagcgtcttatttctctcactttcatttaattttgctaccggaatacccgtccatcttgaaacgattcgtccgatttcttcatctgtcaccgcttcatgcacaagggaaagatctttggctttcacccgttcttcctcttcttccaactgcttctgcaattgtgggagttttccatattgcagttctgccgccttattcagatcatattctctctgtgctttctgaatttccttattgacctgctcgatctcctcacggatcttctgaacatgctcaaccgatttcttttcattctcccactggactttcttacctgcatactgctctttcagttctgccagctcttcctgcagatgctccagccgttctttactcagacggtcttcttcttttttcaatgcagactcttcaatttccatctgcattacacgccgacgcagttcatccaattctgtcggcatggaatcaagttctgtcttgatcaatgcacacgcttcatccacaagatcgattgccttatccggcaggaaacggtctgaaatataacggttggatagtgtaactgcagctaccaatgcactgtcggtaatctttactccatggaaaacttcatacctttctttcaatcctcttaagattgaaatggcatcttccacggtcggctcatctacgagaaccggctgaaaacgacgttccagtgccgcatccttttcaatatatttccgatattcatccagtgtcgttgctccgatacagtgcagctctcctcttgccagcatcggctttaacatatttcctgcatccatagcaccatctgtcttaccggcaccaacaatcgtatgcagctcgtcaatgaaaaggataatctttccatcactattttttacttcctcaagaacggctttcagacgctcttcaaattctccccggtactttgcacctgcgaccaatgctcccatatccaatgagaagattgtcttgtccttcagtccttccggtacatctccgctgacgatccgctgggcaagtccttctacaactgccgtcttacctacaccgggttcaccgatcagcaccggattattcttcgtttttcttgaaaggatccggatcacattgcggatctcttcatctcgtccaatcaccggatccagtttctgctctcttgccctgtccaccagatcctgaccatatttatttaaagtatcataagttgcctccgggttatcactggtgactctctgatttccccggacagtagaaagagcatgcaggaatccttcccggctgataccaaattcccggaataattctttcatctcacgactcgcatacttcatcatagcaaggaacagatgctcaacggaaatatattcatcccccatctgctttgcctcatcttctgcatggatcagaacgttattcagatcctgaccgacataagccttgcctccctggactttcgttctttttccaatcgcctgctctacacggtttacgaaaagctgactctggatactcattttttcaagcaattttaaaatcagactgtcatcctgcgtcagcaacgcatacagcagatgctcctgtgccagttcctgattgccattatctgcggcaatcttctcgcaattctgaacagcctgcaaagaattctgcgtaaatttattaatattcatagtctttccctcctttgaaccacaagctttctccacgaaactcttctttcagatgatctgcggagtctttctttcgtgttctagtagaaatatagcacgtattgttagcactgtaaagagttgagtgctaattttttaaaaatttttgatgtcagggtcaaaaggtctgaaaccacgtgtgcttgcacactggtggtagaatgaccttgagacccgccccgatatgagcataaaagtggggcgtaagcaccacgatatgcgaatagcgggtaggattgtgggagtgcgtagcacgaaacaatccgttggcatcattgttgggggcttttgaccccaacatcatattttttataaagcacattttcctggacttcataatgagcctgtcagcacagagggattagactatctacgcattcagggcagcgaccactgggttgttactatgaaggcagatgatcctctttcacaaaaaaggatctgctcggtcttccgctgattctcccggaacgtaccacaatccaaagtgaattagccaactggtttggcaatgattttgataaactggacattatatttaccagcaatctcggcacaaatgccggagtgatggctcttcacggactgggatttcttttctgctgctttttatttttattactttctttttcttttctttgaataaatccagtaaagcccggctgaacatgccatatagatggcctcaattcctacagagatccgaaattccgttgaatgaatattctgaatattcattcccatgatcgggaatgtaaataaatgaggcagaagtcccagcatacttccggcaaaatagactttataatcaattccaattgccccaagatacaggctcaggacatcactcggtatttttccgatcacccggagaagaaatgtcagtatgaacccatttcctgtacagatctcttttaacttctccgtcttcggatacttcttcataatcgaactgaccatcgtaccgccaccttttttccctatgagccagggaagtgtaaccatgatggcagcaccgcagaaattcacggcaatggcaaatttcatcggaaagatcattccgcttaccgcaaaaagcagaccggaataaataacgacactgacgctttttacagcaaacagtcccatcatcataaagaatgctgccaataaatttccgggtgtatggttcaggatctgctcagttgtcagttcttttctaaaataaaagcatcctgcaataatgatacaccacacaatcagtaatccggtcttctgccattttttcattccggtttcctcactttctaattaatttttttcttttctgcgaaatgatcagtcccaccagtatcaagatcgaacctgaaacggatgcgacggtcattttctcatccaatacaaacattgataatactaccgtcacgacaggggaaacatagatatatacactggtcttgacggctccaatccattttgttgataaattccagaggaaaaatccaacagcacttgcaccgacaccgaggaacagaaaattggagattacttccggtcgtttcaatgcgtccatatcccacatcgcatgctgcgaaataagcaccggaatcagaaaaataattccataaaagtaaattcttcttgttaccgcagccgttggataattccactcttcaatctttttaacagtcgcagaatacaatccccaggaaatcattgcaagaaaagcgaggaaattacctgccggatttaaattcaggcttttctgcccgttcaggctgatcaaaataattccggttatggcgatcacaaatcctataaaaaagtttcttcccggtcgttcacttttaaagaaaattccaaccataaccgcaacaaaaaacggtgcacatgcaacaataattcctacattggatgcataagtcatcgttaatgcagtattttccatcatgaaatacatcacaatcccaaagaaacctgcagccgcaaatcccagttctctcttcttatctgcaacttttagacggtgcgggaagaaaatccacaatgccaaaaatgcaagtaccgctcttgtgaacaggatttccacaggaaggaaatatttcaacaatacttttgtcgatacaaaagttgctccccacatgatctgcgttccacatgccagtatatgccctgttactttttttctttcgtctgtcatctgcaatttttcccgcctttttcctataatatagatgtcggggtcaaaagcccccgactttgatgcccacggattactccgtgctacgcactcccacaatcctacatcataatatatgctctgaataaaagaaaaaaccttcaaaagtcttccgttacataaccgaagactttcaaaggtataaaaataagcgggtgatgggaatcgaacccacgtatccagcttggaaggctggtgttctaccattgaactacacccgcgtgtcaaacacaaataatatattaccatacttttcaaaaattgcaagtgctaattttatttttttcgatttttgcaatttttaatcattctataggtaggcagacagttctctaccaaaagccggtttcgtaccagcctctgctttttcggcacaggaactgtctgccattttactgcttattcacaggctgctcttttttcacttttccttcgtaaaatctttttccctgttcccacaaaattggcaacaggaaaagaactatccccaaaatcatgaccacattttctgaaagggctgctgcagaatttccatcctgccttcttcctgtctgttgtctgtccccaggttctacaacatctcatagaatacaccaacagaatcatttctacagattttttacatacaacgcccggattgcattcaaaactgcaatcaccataacacctacgtccgcaaagattgcaacccacatattcgcaataccgattgcaccgaggatcagacagattgccttgatcgtcaatgcaaagatgatattctgatagacaatgcggatacatttctttgaaattttgattgcttttacaatcttcagtggatcatcatccatcaggacaacatctgccgcctcaatcgctgcatctgaacccatggctcccatggcaattccgatatcagccctgccaagcaccggagcatcattgattccatctcccacaaatgccagcttcgccttttccggtttttcagccagcagtctttccacctgggctaccttgtcagacggaagaagttcactgtaaacctcatccagtcccagcttttctgctacctggtctgctacacgcttcgcatcaccagtcagcattactgtcttctcgattccggcagatttcaatgctctgattgcctctttggatgtcggtttctccacatcagaaatgagaatatgccccatatattttccgtcaatcgcaatatggatgatcgttcctgcactgtggcacgcaatcggagtgattccaagccgcttcatcagtttatcatttcctgcagcaacaagctttccatccacctttgcggtcacaccatttccgctgatctcctcaatttcggatactctcgtcctgtcgatctcttttccataagcacgctggatgctcctgctgatcggatgagaggatgcactctctgccagtgccgcatattccagaagcttctcttcttccatttcactatgatgaacaccatttacctcaaatacgcctttggtcagtgtaccggtcttgtcaaatacaacatattttgtctgagacattgcctcaagataatttgatcccttcaccagcacaccttcgtgactcgctccaccgattccggcaaagaaactcagcggaatactgatgaccaatgcacacgggcaactgattacaaggaatgtcaacgcacgataaatccacatatcccactgcggggctgctcccatcgccagcatacggactaacggaggaaggattgccagtgccaatgccccatagcacactgccggggtataatattttgcaaactttgaaataaagtcctcggatctggattttcttgaagttgaattttctaccagttccaaaatcttagaaacagtagactctccaaattcttttattgtccgtatcttcagcactccggtcatattgatacatccactgatgatctcatctcccacttttgtctcacgcggaagactttctccggtcaaagcacttgtattcaatgttgaagttccctctataactattccatcaatcggaactttctctcccggctgaacaacgatcactgtgccgatttctacttcatccggatctaccctttccaactttccatcctgctctatgtttgcataatccggacggatatccatcagttcactgatatttctccggctctttccaactgcataactctggaataattccccgatctgatagaacagcataacggctaccgcctcgttgaaatttcccgatcggtcataaattgcaatggcgatcgctcctattgtagcaactgccatcagaaagttctcgtcaaatacctgtcggttaaggattccttttcctgcttttttcagaatatcataaccgataaccaggtatgggatcaggaaaagaatcatccgcaaaattccctttaccggtataaaattcagtgcgatcagcagtactgctgcaatgataatacggatcagcatctttttctgcttcttcgtcataaaccttcactccttttattctgcctcttacagataaatctcgcaatcatcttctacttttttgcagtttttgaggacatctttcataactgcctttacatcctgttcttcctcaaactccacgatcattttctgagtcataaaattaactgttgcagtcttgacacctgcagtcttctttgcagcttcttccattttatttgcacaatttgcacagtctacttcgattttgtaagtctttttcatagttccgtctcctttttcaatcagaatatcttttaggggtatcaattaaatatttgtttaattgttatatcttcattatacaaatcaggagggaaatgtcaagagggaaatttgtatttgttggaatgatacgcttgtaaagcaaaagacctctttatggcgaagcggacgcggaaatcagagatattccttcgcagtgcaggcccgctttacctcagcccgttgaccgtttgtaactcgaaagtggaaatcttcgtgcaatggcactcgatttactttctctaacaaacgctgcaaagtgtcttcggaacgctcctgctaatgcacctgcttaggaacaccctgctttccgctgaccatctcgataagaagttttttagctccacagcgtatccacccaacaatgcaaatttaaaaagaatagaaaaaagccggatggctattgactaagatattcgatcataaatatcagataatagatattgtatttaatatgatgtcaggatcaaaaggtctgaaaccacgtgtgcttgcacacaggtggtagaatgaccttgagacccgccccgatatgagcataaaagtggggcgtaagcaccaggatatgcgaatagcgggtaggattgtgggagtgcgtagcacgaaacaatccgttggcatcattgttgggggcttttgaccccaacatctttaatatttgactaatcattcatcttagttgatagccttccggctctttatttcttattgaaatttcgtattgttgagagaaaatgtcccggtacgaggaactctttctgacttgaaaagcctaatatccacacttgttgttgcgtgagcagtgcattgacagggagcgttccgaagacactttgcccaacttgttaaggaacgtaaacaggagtgcctctgcacgagtgtttccacattcctgttacaagttgtcaacgggctgaggtaaagcgggtcctgcactgcgatgcaacaacaagtgtggatatggacgctcttctgtcagaaacacttcttgctgtcgcgatattttcaccccaacaactacaaatttctcccctcttgacatcttatgataaaatagaactaacagctttttacatcttgagaaatttttattaagaacaggaggctttttatgccaggacatattcttccccacagccacggtgaatctatgaataccgaacatattcttcatgtaatctctcagacagataattttcagaccgttgcagaatcttttaaaattctcggagatccgacccgtatccgtattttctggatgctctgccattgcgaagaatgtgtcattaacatttccgctatgatggatatgagcagtcctgctgtctctcatcatttgcgtcagcttaaaaatgccggactgatcgtcagccggcgtgagggaaaagaagtgtattataaagcggccgacacagaacagagccgactgctgcatattatgatcgaacaagtattaaaaatcacctgtccggggaactgatcgcagtccccggattttccatttttatttcgtttctatttgatttttaaatctttctgcttattttttcggctttttcctgatttcactgtatttcccgcaacccataaaatacttcctgctacgatacagaaatctcctacattgtatgtcagtcggtcgaattttttatttttctgtctgattcctatataatctaccacatagcctcttcggaatctgtcccatgtattactccacgcacctgcagcggtcagagtcagcccaagcttttccagtattcttccttttcctgcaccgacaacagctcctgctcctgttaccacagttgtcactgcaagggaaagtttttttacttcttccggacattctgataaaagttcaaatcctcccccctggttatgtactctccgaagcacgatcctgccggtcagctttttctctgttcccggctgcaaattctcttctgcataatttttcagactttcatctaacagaaatattcctgcaccgacaagcggtaaaagaacttttttcatcaccggatcttactcccttacaagaacttttacgatttctccaagatacatcgtatgataatctttctgaggataccatttttcatccggtccatctaccgtgaaaaattccggcttcattggctgtgcatacaatttcctgcatacaaataccagatccgcctcctcataggttgtcgttccttccacataatacggtgtcagtcctgcctctttatctttatcacagtcacgtcccgattttgtaccacacaggttcaatgcttttctgtactcttctttaaagaaggaaagtgtatacatatcctctgcatccacaaattctttcgtgtatctctgaggacggatatatgcagtagctacattcattccccacataatacctacaccaccccagcttgcagtcatcgtattatgcttttcttcatttcccgccgtgatcagcatccattcttttccaatctttgtaaaaggattaaatgtaaggtcttcaatctttacttctttcagtgccattttatttcctccttgcaagacagcgttactgtccataacctgctgtgaccagtaacgctgttctttctattttatattcgttctattatttcataatcactctgcggaaatttttctttccttttttgacgatcttgccttcgccttcaaaatcagccggaacatacgctgtcgcaatatctgtgatcttctctccatccacagatacacccccctgagttacagcacgtctggcctcggatctggatgatgcctgtccgcctttcacgagaaccgcaaggatatcaatctttccttcctggaaatctccctcttccagttccgttgtcggcatattatcagcatttccctgactgaacaatgctcttgcactttcctgtgctttcttcgcttcttcttcaccgtgaaccagctttgtcagttcatatgctaggatctcctttgccgtattaagctgtgcaccttcccatgcatccatcttatcaatctcttccaatggaaggaatgtcagcatacggatacatttcagtacatctgcatctccgacatttctccagtactgatagaaatcaaacggagaagtcttctcaggatcaagccacaccgcccctgactgagtctttcccattttctttccttcagagttcagaagcagcgtgatcgtcattgcacttgcatcttttccaagcttacgacggatcagctctgtacctgccagcatattgctccactggtcatctccgccaaactccagattacagccatagttctggaacagttcgtagaaatcatatgcctgcatgatcatgtagttaaactcaaggaaactgagtcctttttccattctctgtttataacactctgcggtcagcattctgttgactgagaaatgcggtccgatctcccgaagcacttcaatatagttcagatcaagcagccagtctgcattattcaccatcagtgcttttccctctgaaaaatcaataaagcggctcatctgtttcttaaagcagtcacagttatgctggatctgctccggtgtcatcatacttctcatatcagatcttcctgaaggatctccgatataacctgtacctccaccgatcagtgcgatcggtttatttccagcctcctgaagacgcttcatcagacataatgccataaagtgtcctacatgaagactatccgctgtcggatcaaatccaatataaaatgtcgcctttccgttgttcaccaaatcccggatacgctcctcatctgttacctgtgcgatcaggcctcttgcctgaagttcttcataaattcccatgatcttttctcctcttaaagactataaaaaacgcccttactgcatctcgcaataaggacgaatctctcgtggtaccaccttaattcgctgacctttctctgtcagcctcttttgtgctataacgtgcaaactccgtcgcagcctactctcctgtctgcatttatcttttcctcaaaatacagtcgatttcaatgcgaagctccaagatgtattcgctgacagtcttccatgtgcctctcatcagccggcaactttctgtatatccctctgtccgttacttcttctcttcatagccttcttttattacctgattatattcggacattcccatgtccattcctttcagatattagactatctcatcccttttgtcaagaccggaaatattctttaagactttcacagcctcccggactgcttcttcgtctgtctgccagatttcaaattcactcataccaggcatccccattgggactccttgccttctaaactccattctgctttctttcacaatctttcctgacatatgaaatgttttcagtccggcatattcactcagcttgctgatcacccccggattgattcctgctcctgcaaggatttcgatcctgcctttcgctctttctttcagctctttcaacatttctcttccattccatgcagaatctttctgtccgctggtcaggatcgtatcgatcccaaggctgacacattgttccagcgtttcatatggatctttacatacatcaaaggcccggtgcatcgtcactttcatatctcctgaaatcctgaccagctcttccatctgctctacattcattgtcccatccggtcttaaaattccaatcacaactccgtctgctccgaattcccggtacatctgaacctcttctttcaacatttcaaactcatattcatcataacagaaatcaccgaatctcggacgcagaagagtcctgatctccaggtctgtatttgcccgtacacctttaaataatgcaggatccggtgacagccctccgatcaccagaccggaacaaagctcaatccgcttcgctccgcctttttgtgctgctaccgctgatgctacactgtcagtacagatttccaaagtatatttcatcacatttccctctttctgcttttacattttcagcttttcttgttttcactgctttatccacattttacatcaatttcccttcctttttccaccccggtcttttctttttcttccaattatatagaaaagccgggtgcacagccaaatccttcagccatgcccccggtcattaaaagggattacttattcaattttatacgttcttatttgcagagtttcttgaactcatcagctacgaactgtactttcattccaacgattacctgaactgcagttttggaaggacggataacacctgctactccggcagatttaatcttcttctcatcaaccttagtataatcgttgatttcaagacgaagtcttgtaatgcagttatcgatagacttaacgttctcttttccgccaacaccttcaagaatgatcttagctacttctgtgaagtcatcgttagaaagaactgctgacttctcagcatcgttgtcatcatcatcctcacgaccaggtgtcttcaggtcgaatttcacgattgcgaaacggaatactacatagaatactacgaatgctgcaataccaagcggaatgatcagccatgtcttagctgctgccggaagggaagcagagaagaccaggtcagtcagaccagctgagaaactgaatccggcacggaatccaagcagaactgtaactactgtaaagataccatagagtactgcatatacaaggtacagtaccggtgcaaggaacatgaaaccgaactcgaatggctctgtaacaccgcagacaaatgctgcgattgctgctgaagatacaagaccgattgctgctttcttcttgttgctcttagctgtatgtaccattgcaagagctgctcccgggataccgaacatcatacatgggaagaatcctgacatgtacattccaaggctccatgatacatcagcagatgtctctccagcccagaagtgagacaggtctccaagtccgattgtatcgaaccagaatacgttgttcagtgcgtgatgcagaccgaatgggatcagcagtctgttaaagaatgcatagataccagctccaactgctccaagtcctgcgataccttttccaagtgcaaccagtgctccgaaaagtacaggccatacaaagagaagaactgcagatgcaatgatggaaaccagtccggctacgattgctacgcaacgctttccactgaagaatgacagccagtcaggaagtttcgcactcttaaatctgttatagcaaagagctccgatgatacctgcaaggataccgatgaacgggttctcgatcttgctgaatgcgataaagtttgtagttccctcttccagtgtcttaataactgaaactgttcctgtagacagaaggtttgtgatcatcagccaggaagcaagagctgcaacaccagctgtaccatcattatcatctgccataccaacaccaacaccaattgcaaaaagaattgccatatggtcaatcagggcaccacctgctttaacaagaaagaacccaatctgctcaagaatacctgtgatgtcaccaccctgcattgtagccgggcagagtgcatatccgatacccataaggataccacagataggaagacaagcaacaggcagcataagagctttacctaatttctgtaaaaatttcataattttcctccttctcaaaatctctcattgctgaatcccttttatctattttaaccggtcatgattccggtcaaaatctaagttgtacgctgctttcaggcaacagccacgcctatttttcgataatgactgcgtcatctccggcttctacctctttaccggtcacgccctctactgatgcataatccattgtattgcagacaagcatcggagtgatcgtatcatatcctgcagcctttaccttatcaagatcaacctctaagagaagatctcccttcttaaccttgtctcctgcttttacgtgacctgtaaatccctctccgttcatcttgactgtatcaagacctacatggatcagaatctctgtcccttcttcagatacaaggctgactgcatggagtgtatcaaataccataccgatctcgccatctgccggagcataaatctttccttctgccggaatgactgccattccttttccaagcatctcctctgcaaaagtcggatcattgacctctgaaagaggtactgcctttccctttaccggagctccgagaatcattttattatcttttttcttaaaaagtccaccaaacatttacatttcctcctgcttttttcttctattttttatattgattgcatttttattcttctgccatcgtaatccttcgtatgtggatcgcaagatacatcacttcttcaccggataacctgcactctgcggtcttttctatataatccgctactttcttactgcaggcaaattctttcggatacttttggctgatcatgtccgccagatcactttcttcgtccggcagaagctctttcctgtaaactctctgaagcagaaatttcatatgagtaataaaccgctcataatgaagcgtcccttcatccagcttgataccaagctccctcgtcacgatctccagaatttctttcatctgattcgggaaacgtaacgcatcccggatattggttccatactctgcattcacaaaatgaagtgcaataaaccctgcctcatcctccggcaattctaccttcagacgctctttgatctgggtaatcgcatattttccgagttcatactcctgaggataaaacctcttgatctcccacaacagtgcattttcaaggttgatcccctttgcatatctcgcaatcgcaaaattaatatgatccgtaagcgtcacataaatgctctgattcagcttcagcttcaatgcaccttttgcataagaaataatatcactcgagatctttgcatgctccaacgggactccggcaagcagctctttaaactgatctgccacgcttccgctttcgatcctgaaaatcttttctatcttatcttcagggatctttgctcccggtctgcttccaaaaccgatcccgcatcccatgactacgacttctcttcctatctcatcaaaagctgaaacaatattattattgatcactttttctatcgtcatacaaccgaccttccaaaataacgtaccaactccgacacgcctttcatgtcttactgttccttctgctaaatgcaactctttcaccagaaaacttcctgtgaaaataaaaaccagaccaactgaacatacatcatcaccgtatgctcattgaatctggttttgcctgccttacagtaacaatccgttgacttatttcgtaatctcagtctatcaaaaatcaccaaaaaagtcaaccgattattttattttatttttatactatttatattttttaataaacattctcatttagttgtcagatttttacaatctgcactgaactatattgaaaattatctaggtatctttgacagtgcagccttatcagcaacgatcgtcacatctctgtggagctgaaggatagaagccggaacttccggtgttaccgggccgaaaaatgcctttgcaacgatatctgcctttccttctccattaacaaccagaaggatcttctttgctttcatgatcgttccaattcccattgtatatgcctgtctcggtacatcatctgcggattcaaagaaacgtttatttgcctcgatcgtgctttctgtcagatctacgcagtgagttgttacagcaaagtctgctgcaggctcattgaaaccgatatgtccattatgtccaagtccgagaagctggatatcaactccacccatggactcgatcagtgcttcatatcttgcacactctttctctgcatcttcctgagttccgtccggtacatttgtattctctaacttaatatttacacggtcaaataaatgcttatgcatgaaataataatagctctggtcattgtcacgggtcagtcctctgtactcgtcaagatttactgttcttacctgagagaaatcaacatctcctttattataccagtctactaactgatcgtatgttccgatcggtgtagaacctgttgccagacccagtacacaatccggctttaaaataacctgtgctgaaagaatattagcagcctgtctgctcatctcctgatagtcttttgtctcataaatcttcatcttttttcctcctcagctctgacttgtctcatcatattagattctttgcaaataccggacctgacttcttatatccaatccttcttatccggcagatatcgttctgcactgtcagataaagaaaaccagactttcagtccataaagcaacctttattttccgaaatctggttttgccttctgataagtaacaatccagtattttcaactactgttaatcttagcagtgaaacgttctattgtcaacacctctttgacctttgtgggaaaatgttaccgcctctttactccctcaaattcatacagatatacatcctccagcgtcgggctgactttcactgcatcatatttaacgggacacttgtccgcaatcacccgcacgatgatctcaccgtctctgcggaacagattactgatctcatattctttcttcacctttgccagttcattctggctgatgcacagttcataaacatgaccgtaaatcctcttttgcagattttccgggctgtcctgatctaccagcctcccgtttttcattaataaaatttctttagaaataaattcaatatccgatactacatgggttgcgatcagaacaaccctgtcttcactcagatctgagatcaggtttctgatcctgatccgctctttcgggtcaagtcctgcagtcggttcatccaggatcaggaatttcggatcattcagcaatgcctgcagcaacagcaccctctgcttcattccgcctgaaagttcttttagtttcttctttcttaccttttgcagattcagaagtgggagcagctcgtccattcttctctggatggttctgctcttcatccctttcagcgtacccatataagaaataaaatgcgttaccgtaaaggtatcataaagctgttgctgctgcggcatatatcccataatttcccgataagatgccccaaggttcaatatttcctctccctcatacaggacactcccggaatcccgcagaagattatccgtcagaagattcatcagtgtactttttccggctccattgggaccaagaatcccgtagataccattctcaaattctgttgtaaatttccacaatgcttttttctttccataacttttacacagatcctgtatctttaattccatatcgcctgtcccctcttcttatagactctgtgcagaacggttcctgccgccaatggaaggacgccccaaaagaccactaccgtcagtgcaaactgcattcctcctgactgtagcagacggtgtccatccagtaatgcattgatgctccaggaatgaatcattccaattccgccccattccatgaccaacgtaccgccaaatagcagaaccgacaggatcagtgtcagcatcgtatcttttaagactgccgacaatgctgtcacgcacaggatcaccacatacaaagtccccagctgcagcagaagtaaaagcaacacatacacccacaccggacagttaaaaaccgatgtccccgtaaatcgcatggaacggacttttgccgtccatcctgtcagtggataattctgaacgatccgcatcactaccggtatctttacaagaatgaacataacagtagtgactcccgctgccactccaagttttaccctcaggagtgttccccgtcctttcttcgtactctgcagaagattcgtcaccttcaggtcatattccatcccaagaagtcctgccgcactgtatactgccacaagaacacagagcaactctccgatcagccttcctttcatggaaatctctccaaacaactgctcatatcccccttcatagatcagctgctgttcgtccgttcctgctgcccggttattttccaccacatactgaacctgttcatatgctcgcatgaatccactgtactgatactgtatttcctcctgccggctgctgatctcctcactgctcagaccgctctcctccggggtcatggaataaacgtcatcataacgtttcttttctctctcaaaagtttccagtttctcctgcgtcagttctccgtgtcctttggtcatataatatttatagtattcttcttccacactgttccatatcatcagacctcttccgagaagaattgctccatacaatactaccacgcacacccatactgtccggttcgtcagaagacttttgaaactctcatgccatatcaggctgtccgaaataaagccttttttcttccgctttcttctttttttaccccaggcagtcttcctgagttttctccatagtttctctgcacctccctgtctgccggattttgtaccatatctgtggctgcaaaatgtggtcagattcagcacgataaaaagaagcagcagacacggcagcacgattggaaaaatcctcattgcattgaccggatattcaaaaaaatcaagattatgatacttcgtaaaaagcggatatattttgatatactccacaagattgatatacttcagtccgtccgcataagagactgacggaagcagcacggtcagcagatattctgcaactgctcctgtgctgatcgcgagaatcgctcctgccggtgtccctgccttttgtgcgatccatatcatcagcaatgcagccgcatagcacaccaccagtttcaaaagcagatacatccacagatattgccctgctgtcagtctgaacggactttcataaaacgctgtcactgactgaaggggacgtgtgagatttccaaaaccatactgatggaaaataaaaagataattacttccatatagcagcagaaccaaaagtcccgtaatccctgccatcactcccagttttgcaccgatgacctctgccctgccacggctggcagacctcaataatggatacaatttattctttttctcatcaaggatcaggaaataaactgctgccatcaacaggatcgtcatgcacagatcagtaaaatctgcctttgttgcctttacaataccatccgacagatcaaaggaaagcttcgttcctttcagtttctcataagccacaggagtcacttttgcgtttctccaggcaaaggttccttcatccgagaaaatagaacctgacatttttgcacttctctctttgatctcctccagatattcatcatatttttctgtctggatccattctctcgaaagctttttaaataattcttcttccatatactggttgcctgtatagtgggcatttttcttcgctttctgctcttccagccattgtcctttcgattcttccggctgctcctgaaaatctgtataaagctgccggacagaagatgccggaaattccatccggatctgctccgaaagattccataaattaaataacaaaaatactgcacataaaaaccaaaaataacgaaaagagaaaaacttctcccattcatatttcagatgccgcatcccctcctcccgaaacatcccctgacccttttaatactaaatcatttgctgccggtcatattgccgtcttcatccaccggattccctgctgaagacatcctcggtgcgatcagcactttcactgctttttttccgttcagcagatcatccatcccgatcactccatcccaggagatccagtcgctctcatctcccgttgtcctgttcgtgatctcataggcaagataagctgcatcttctgtcacaaaatccagccgcacctcttttgcatcagtgacaggcagaacttccataagtgaaacttttttatttacatggtgactgtctttatccactaagtacagcacatcacccgcctcacataaaattccatcctctctgatcccgatcaaccggatactgctctcttcttccgctccctgaatctcttcttttttcagtaatacttcttccttgctcttttcaatatcataacgccagaccgtactgcttttttctccatccgggtttacttcccagtcctcataataaaaaattttttcctgatctgcaggaacaatctttttatatccatcagctgtatgcagagagatttcttctgatttcccggttttataatctaaaatgtaaaagaatccctcataattctttattacggaataaacctgatactcctccgttcctccaagtaactgcaagccatcacagatacccgcatccacgtacacttcagtttcaagtgtatcaaggttcagacactcaatactccgcgtcatggtgaaatcattcagctcttctgcattctgaacatctgccacttttgaaacggtatagatcaaccggttcttcactacaactccctgcccgaactttccataaatatccatcaactgctttacttctttccggtctgtccgatccagtgcagagcttgtcagaaccgttccatcttcattttccgcaatttcatacaaccggtctccatatgggaaaatatacatatcctcgccactcaccgcattacattctgtatcaggatcttctgcttccgataaatgcctgcattccggtttattgcagagcgggattgctttttcctctccaaaatcaacataatagcaaatatcgtcccggatcttaaagcacccttcttctgtctttattccctccgacatattgaaaagttccatatagtctgatgcaagcttttcatttttgattcctgtattctttttcgagcatccggttcctgcgatcagcattgcaacgatactgcctgttaaaacgaaaacttttccccttttcctcatctccagcacccctttttcttttaatttatcaagtatgacttaagagagcctttggagaaaatgaaagaatttctaaagaagatttcctgcggatgaaatatgcggactatgtactacttttatttttccctctttatcgaacagctccgaccagctaatatacgcataccaggtaataagatctccctctgtatctgatttttcattgttcgcctgataagaaaagaaaaagccttcctttgtggtacttctaattccgctcagccacgctgcttcttccggcagccgctcactaatccctgttctcagaatttccgtccccttctttacatacagttcattttcgggtaatatcctgaataaaaccgttccctcatgctctccttctatcacaagttctatctccgtagccgcagtaatttttttcagttctcccgctcccacaacagaacttattttttctgtctcagtctcatatttataaatctcttttccatcatttcctacatagtaaagagcctttccgtcatctgacatttttatttttgaataacttcctgtattcaatagtatcgaaaccgtctcttcattcagataatcaaatctgtaatactctgcaccacggtcttttattaccgcataaaactgatactcctcattccctcccaacaggcaaaaacttcgtgcatcctttatttctaaaattagtttttgatccatggtatctaaatccagtgaacataacttccagacaggtgtctcagccgcttctcctgatccggttatctctcctgttgcatcattcatcaccgtactgacataatacagcttattttttctcacaactgcatccgtcaaaagtgatccagtatcaaaagttcctccacttttgggattgctcccatctaagtctgacagaaccagttcacttttcccatttcctgctgtcctgatacgataaagtttctccttatatggaaaaattcttaccccatcacaaactgcattgcactgtgtatcttcgtcttcatatactgacaaatgacgacaatccggtttattacagatgggggtacaaatctgatttttgtaatctgtaaaatatgcaattccttccattacctgaaaatctcctttttttgttacagcaggatgcgttccaaataattccatatacccggattcaaattgatctttcacagcagaatttttttctttcccacatccgctcaaaagcacaaaaataattccagttaataaaaataactttcttttcattttgtcacctccgtccggtatataaagtctcttttactttgtattatatttggatttcccctctcatttccgaaaatgtaacaaataccccctttttatgtaataattcacacaaaaagagggtattattttcaattttataccatattcaatctatttttatatcaatacacttctatatcatttcacttttttcccacagatttaccgtaactttaaataaacctgacttcatctgatattcccaaaaaccatcatatttttttacaatctgtgcaatacttcccattccaaatccatgattggtcttatctttcttctttgtctgaagtgtctctgtatcttcattgcatgggttttcgcagtgtatcactactccgctattctgatattctatcagaagccggatctttttttctccctgaaactcctggcatgcctcgattgcattatccagtaagtttcccagcagtacacctaaatctgttccctgaatttttagctgttccggtatgtgaatattaaactcatactctgtctgagccatttccatcttctgtaacttcagattcaggattccatttacaactgcatttgcagtaaaaattttctgttctgccgcagtcatctgctgaagaagtatctcaatctccttttttccttcttccatttctccattttcaagataaccataaatgcccgacaattcattttttatatcatgcctgattcttcggatttcctgctgatgttgttctaattccctgtaatgggctgattcgtattccagttcttttaactgattccggatcatttcctcttccctgaaataaacttcctgcctgcggaaaagcacatataatacaacattgataatcaaaataaacaggatcagcatcacttccatccacacattgatctgctctcttgcaaactgatcctctgtcacaattacaagcagaaccgcactaagtgacgggatgaccagcagttgcccctgtatatcccttttctctgtatttctcttttttcttgacagcagatagaagaaaattgttgcaataacccggatttctctggaatatctctttcccagcaggatcactgcctcctcctgatttcccatatcactgatccggatatcatatgctcttgacagtcccacagccacaacaccttcagctaaaaatgcaaagactaaatagagcagtccagccagaattttcctcttcaccccaccctcaaaaaaggataaaagaatgaacagttctatcactgcaatcaatatatttatattcgcatcctgaaagtaatgatttccgattgttccaacttccgaaactccaatcagaaccaaccagtccagcacctttccaaaccttacttttctttttaaaaagcacgatacgaataaataggtctgtatcacctcaattattggtattatcatatcattcccactctcatcttcgcatttccaggcaataattctgaaatgccctgttaaactgatctttatatttccttgtcaccggaatttcttttcctgactccatcgtgatcgtatctttccgcacacttcgtattttctcaaggttaatgataaaagaagcatgaactctcacaagcagactgcctttaaattcgtgttccaggtcattgagccgcacataaaattcaccgctgcctcgcctgctgcagatccgcacttttcttttttcactttctatgtactcaatctcctcgtgataaaagatctccactcctgactgattttttaaagcaatccggtttcttttttttgacagataccggaaagaacgcaataatgcctgtcttacttccacctcatccaatggtttcaccaaataatccagtgccgatacctgaaatgccttacggatcatttctttataatttgttgcaaaaaggatcactgcatggtcgtctttctccctgatcttttccgccagttccattcccgtcatctgaccaagctgaatatccagcagataaagatcataaaaaggatttcctttttccagtaattcttctgccgatgaaaatacttcgcaactcccattgatcccggcttcttccatgcactcacatacctgcttttctaaaaaaagctgaagtgcctcttcatcttcacagaccgctgccttcaactttccactcccccatcccttataaactcgttctaaataattgaccctcaccaggctcagctttcaaccgtcggacgttaccgcccgtctgcactcttcaatccagataatcgatcttcaccagtgtcagcccctgcggcggcacggtcattcccgctgcctgccggtcttttgcctccagcatcgccgggatctcttccggatcgatcagtcctcttccgactccgatcagtgttccggcaaggatacgcaccatattgtaaaggaatccgtttcctctgacccggaatgtgagcacattttcttcccggatcacttccagccggtatatggtgcggactgtatcttctatatgcgtatgcacattacagaagcttttaaagtcatgctccccttccagatatcccgctgcctttctcattttctccaaatccagcggaaaagagacgaaataagtatctcttctcctcatcggatcggggagtttttggttcagtacccggtattcataggtcttttctgtattgcagtgtcttggatgccagtctgccgccacctcgcaggaatcaactactacgatatcttccgggagcaacgcattcacagcataaagaaaccgttccggtggaatggaagattctgtatcaaatactgccacatttcctctcgcgtgaactcctgcatccgtccggctcgccccgatcacctttactgtctgcccggtcagctgagtcagtaccgtattcagttctccttctatcgttgccacattattttggacctgccagccacagtaatcggttccgtcataggcaactgtcagtctgattcgtttcattcttttcctgtcctctttttctattatctgattatcaaaaaatccatatcttaaatggaatatatcttcctgcacctacaatcgccactaaatacagcagtgtgatcagataagcaactctgtcgtttctatgatactgcaatggtttcatctttgttcttccatccccgccatggtaacatcttgcttccattgccattgcaagatcattcgcccgtcggaatgcagatacgaacagtggcacaaggatcgggatcattgcctttgccctttgcaggatatttcccgattcaaaatctgcccctcttgcgatctgtgctttcatgatcttatccgtctcttccaaaaggattggaataaagcggagagcgatcgacatcatcattgcgatctcatgtaccggaacatgaacccggttcagcggatgaagcagcttttcgattccgtctgtcaggctgttcggagtggtcgtaaatgtcatgatggaagatcccatcaccagaaagatcagtctcaccgtcataaaaacgcatgtccgcagaccgccctccgtgatcgtaaggattccataatgaaagaggatatttccactcctcgtaaggaacaggttcatcagcaccgtaaaaagcagcaggatcacgatgggtttcagtcctctgacaataaattttaccggtacttttgaaagccggatcaccattgcaagaaatgcaaatgcaactacatatcctaaaatactgttctgtaaaaataaggaaaccagaaatgccagcgtgcagacgatcttcacccgtggatctaacctatgtacctgactctgtgccggataatattgtcctattgtaatatcacggatcatgcctgcacctctctttctgccttttgggtctgcttcaggcatttcatgatctcatctgcggcttcttctaccgttgccgcatctgctgacacttcaaatcccttttctttcagatcatgcatcacgtaagtcacctgtggtgcagcaagaccgactgcctcaagttctttataatgccggaagacttcctgcggtgttccgtccagcattttttccccctggttcatcacgatcagacggtctacatattttgccacatcttccatgctgtgggataccagaactactgtcatcccggtcttttcgtgaagctgtgccacctgatccagaatctcgtcccttcccttcgggtcaagtccggcagttggctcatccaatacaagcacctttggatgcatggcaagaatccctgcgatcgccacacgccttttctgccctcctgagagttcaaatggagactgatgataatatttctccgggaatccgactaactgcaatgcctcttttgcctgtgcctcgcattcttcttttgaaagtccctggttctttggaccaaagcagacatcacttaatacatccacttcaaataactgatattcaggatactggaataccagtccgacctgcgtgcggagctgcttcatatcgtatccttcttcataaatattttttccttcatagagcagccttcctgaggtcgctttcatcaatccgttcagatgctggatcaaagtggattttcctgaaccggtatgaccaatgatcccgacaaactgtccctgtggaatctcaagactgacatctttcaatgcgtgcttctcgtaagcggttcccggattgtatacataactgagatgttctaacgtaatcgacataatgcttctaccagttcttcccttcttaaaattccttttggcagatccactccacggtggatcagctcatctgtcagcatcgtaacctgtggtacatccatccggtattttttcagttcatcaacccggctgaaaatttcccgtggtgtgccatgcataacgatccgaccatcatccatgacaaagacctgatctgcatccaccacttcttccatataatgagtgatcaggatcacagtcacatttttttctctccgaagcttttccactgcagagattacttcttttcttccatttggatccagcatggcagtcggctcatccagtacaatgcattttggctccattgcgatcactcctgcgatcgccactctctgcttctgaccgcccgaaagcttattgggagaatcttttctccgatccagcatcccgacagcacgcagactgtcctctactcttttccatatctcttttgtcggaactccgagattttccggtccgaatccgacatcctcttctaccaccgttccgatgatctgattgtccggattctgaaagaccattccggcactctgccggatctcccacagtttctccatatccttcgtatcttttccgtccacccacattgtcccgtctgtcgggacaagaattgcattcatatgctttgccagtgtggattttcctgaaccattatgccccagcactgccacaaaagacccctgcggaatgtcgatgtccactccgtcaatggctctgcagcttccgatcacattgccgtcttcgtctcgtttatcatattcaaatacaagcttttcagcacgtatcatgcccatggtataccgcctctcctgaatcgtatttcatcaagtttctaatttcttttatccaatttcttttatccaacggattttattgtacggtatgacacgggaatttgcaagctaggaatgacgaaagccttctccggatattcccatttcttcagggatgcttaaacccttccccgaatacttcactcgtctcggtgaacatcagaaatgcggtctcatccgtctttctcactgcctcctgaaccgtatatgcttctgatttggagcaggcacacagcaatacacttttctgttgtccggtataccctccgatggcttctataagtgtcacaccacggtctgcattttcccggatcacttttgccatctttttcccgtcagacgtaataatgatcgcaagtgttcctgccccgatcccgtaaagaactttatcgatcaccaccaccgaggcaaaggtagcgatcagtccgtacagcactgcatccacatccccgaataccggccagccaagaagaatgactgcaagatcgatcatcaaggtgattttcccaagcgaaaacgacggatgcttcttttttattgccatagtcagaaaatcgattcctccagaggacgaaccccgcaggtagaacaacaccattcctccgcccagcaagactcctgaataaactgctgccagcagacgctgtccgcggtacagcggaaaaaagggaaatacaatatccaggaaaaatgttgaaataagcatggtcaccgctgtcttcagaaggaatttttttcctactgctttatagctgatcaggactaacggaacatttaaaaccagggtcatgatccccaccggcagtccccacagatgattcagaatcagggcaagtcctgatacaccgcccggtgcaaatcctgctgccccggcaaaggtatcaatccctgccgcatacaaaatacttcctgctatattatataagaaatcatacagatgcgattttttcataataaaagagcatacctttcctttttatcgtactcagtatgctccgtttaagctcgaattattctttatacagattcatagatgtcgggggcaaaagtccccgactctgccatctgtacaaatctgctttataagaagatttattcgtctttcaccggattttcaatacttaccttgtgatcataccacacgccttttttcccgatcagagccagatcaaactcctgatcgatcactgtaaccggaatatcaaatccataaacctcttccgtagttccatcggaataggtcaccgtatctacggtcggctgcagaagctctgctccatccttctgggcatcctctgccttaccagggaacagattgacaatattctttgaatgaagggtgacatgaaagaccatctttccgtctttcacagtcaaagttccttttccatcctttgtctcatttgcatgaaacatcgaactgtctgtatgaaattccgcagtatatacaccatcttccagtcctgcatcttctgctgcatttttcttttccgaagattcttctgccgttccttcctcttttgaagaatcctgttctgtctgtactttcttagtatctttcgtatctgccttaccgccacatcctgcaagcattgaggcagtcatcataacagaaagtgtcactgccaacagtctttttctcatgaaaaataatctcctattctgcatccattgctgcttttgtatgagctacataaagctgctggatctctttaatctcacctaaaccggcaatctgagtctcaatgttgtcaaatgcgtctgccgcttcaaactggctcttccaggaatcatcatcatcgcctgccatatcattattggcatgatctcctgctacaaccatcagcggacgaagtacaacatttttgtatcctgctgctttgatcttttcaatcactgactcacaggaagtctcttccggttcaccttctactgttccgataaatacattctcatatccaagctgttccatctgcgtctgcatctgggaatagctgatctttgctgtatgggatgttccatgtcccataaatacaaatgctgttcctgcttcttttgcagcatccaggctttcatactcggttacttttactgcctctgctgtgatcgcttttgctacggcttccttatctgcattgatcacagttgcatcggaaccaacttctccaagcagtggctctgcaatttttactgactcgaacttatctttataattttccactgcttctgtcagctcatcatattctgcaccatgcatcagatgcgtcggctgcacgatcagattcttgacaccgttctttacagctctttctaaagcctgatccatattatcaatcttttctccgtcacgtgcctgaacatggttgatgatgatctgagccgtaaatgctcttcttacagaccactcaggataagctgcctgaagtgccttttcaattccaccaatatcctctgcacggctgtcattaaaggaagttccgaaacttacaactaaaagttcattttccccaatctcatcctcattcagtggatcatcttttgatgcgtctcccgtatctcttccgaaataatccgggtctgcattttcaccttctactaactctttctgtgcatctgtcaatgcatcccatgccttctttgcagcttcgcactgctcatctgtcttgtctgtcctctcctgtacataaatatcatcaatcagctttgccactttatctgccgcctcctgatctttttctttggttgactgttcagatttggttgaattgtcgtcactgttctttccaccacatccacttaacatggatattccaagtgcagttaccagaaatgctgtcaataattttttcttcatcttttcctccctgatctttgatcaatgctttttggaacagaacggttcagatatacagatatacacaccgactctggcttttgtctgcataaataagtaaataaaacccccgttaaaaacgagggttcacataatatcttctttacacgaataaactgtcttttttataaaaaacagtctgtcctattctttcgtaccgccagttcctcgtgacctgaactcttcgttcctgtactgcgaaaggcaggtctcccggctgatcgttcagacgcatccagctcaccttcccggtctcccagtggtcttacggctgttgctcacgaaatacggtgacgagttcgtacaggattcgcacctgtttcccttttcaccagtcctgacattttgtccgactgacaccttacgcatctttcatttaattgtaacggggatattctaacaccttccctgaagatctgtcaagaaatatccctcttacctttttgctcctccaaagtcctgcgtaatctttcagtctcttcctccgctgcttttgcacgcttttccgcttcttcaatttcttcttttgccttccttttcacctcatcaacttcctttttcgctttccgcttcgtctcgttcagttcttcttccatctcatcgatcatcagctttactgtatttcgatccataatttccagttcttttgaaaacatctccatcatcccttccatattcaggcacagagtgtagatttcttcataaattttctgaaattcaggattcctgtccaacagtttcataatcatatccggatcatcctgacttagaaataccaaccactcttccaatttattctctatctttttatctttattgtggatgatgttattaaaaatgtcaagacatacaaatgtatactcctgtaatagattgatctccacgccggtatcgcttgtctgtcggaatcgatgcaggtacagctctgctgaaaattttctgaattcactgccactcttttcaaacaagacgattgtgtatactttttttatatttttatagctgaatgttgcacccagttcctcccttgctcttttatactgtctcagtagcagatccgccgaatagcacgcacttctctctcccgggaacagatacccgatcttctgcacctctacatttgcaatacttccgtcctccagctgtactacaacatccatcaccagcagggaactttcagccgcaatccttgcagactcatttggcagtacctttaatactttcactctctgtcccaacatctctgatataaaatcattaaaccgatccggtctggtatcaggattcataatagctttaaaataagtatcatataataatttgattcccttcactcccgtacatagatcgagatattcctgctgacaggtttctttccatccacaaaaagttttccacaactctttattttctcttaattcttcaagcacctcccctcttgtccttatgattggaaaataattttgcagtttgttcttcataggcaattcctttcttctgatgatttttttctgactgttctctgcagattttcattttgaccatttattttaattacattgaatcgatgctttgaataaaagctgttgaccttgttctgaattcagatgctccatgaatcggagtaattacagaatacatgacaaatactggaattgcaatttgtattttgttcataactcatcttttttgtcgataaaattgtggataatttttttggggaggataacaaaagagtccggacatacattttctgtatatccagactcttttctttttaacaaagcttttcgcagctcagttcattttcatcctgtctgcatttcttaagctctgcgtttctttttaaatgcaattacgatcactgcacctgctgcaagcaatgtcattccgaagaatggaattacattggctgcatctccggtcttcactgtagtagtcttaacggcatctgccttcttatcagaatcattcttatttaagtcattcttatttgaatcatctttctttgaatcattcttcttatcatcgtcagctgccggtttctttttcagaccatccagtgccttctcgattgctgctgccattgcatcaactttatcctgttcggattctttcagacccttttctaccgctgcgactgcatcatccaaagccttcagactttcttctgtatacttacttctgtcaatcttatctgcttttgcaattgctgcattcactgctgtatagtctgcatcctcttctacagctggtttttcaaccagtgctgcatacgcattattgattgctgctgccattgcatcgactctgctctgctcggatttcttcagtccttctactaccgctgcaactgcatcatccagtgctttcagactctcatctgtatatttgcttctgtctactcctgcagctttttcttttgctgcatttactgctgtataatctgcatcttcttctacaaccggtccgtcattttttgccagtgctgctacggctgcctcaagagctgccttcgcattggctacttcagaccaggacttatccggctgatttcctgcattgatcgctgcatcaagttctgtgatcagtgcttcagatgctgtgatctgctcattcagggctgctacagattctgctgtataaatatcctttgccacctctgtctttgcttcttttaatatcttccggtattctgtcagatcgtatggatctgaatctgttgcacttccatttacctgaatctctacgatatggttctcatgtccgcttgtagtattacttccaactttacccattgcgtacagacgtacatatcttcctgtcacagcttctccgctgtataatgcttttcctgctgaagtttctgcatataatgtatctgtcggatccacacctaaattatatacatcagaatctccactgtaatagagaactgtcttcttcgcaaaatctgctgtatcagatactaccagtgcggttgccttataagttcttccatcagaccagtaacgccataagtttacattgttgatcttgcactgttgtccaagatcgatcgtaatataagaacctttatcttttccatcttttccatagattgcatatttatcagaattattgtaaacgccgtctactgcattggaaagcggacttcttgtattggtcatatctgttgtctcatcagggtctacccatgcagatgttacatttttctgatatgccagattctctactacttttggcacaagtgttgcataacctgctgtcagtgcctcttttgctgcctggatcgctgaagcatctccacctgagatggcactcgttgcattggaaagaagcgtatccatattggctgctgtccaggactctgttgtccagttatctttttctgctgtgatcttcttcacagtctctgccagtcctgatgtcggaacttcatcgtaaccaagacttctgtcataaactgctacatttgtcacagctccgtttacaccattaccaacgatctttgctgcaggaactgcgaactctttgttctctgcattatatacagacgcacttatctgtccgtctacataaatacgaaccagtccgttattttcttttacaccaacgatcatagattctgttgcatcggaaataactgcatcagctgttgctgtcacaccgtttaccgtgaaatacggatgtccttccgcattgattccgagttcataagcatctccctgctttacaaggacaacgcttctgtctgctgtctgaacctgtgctgctactgtgaatccgttggttccttctacgctacggtcttttccactgatctcgctgttgcttccctctacagtttctttctctgcaatcttattctctgcatagtatggagctgagatctttcctgtgatctgatttccggctgcatctgctccactctctgcggatacttctacaacatcgccatcattcagtgctgtagcaaatgtcagtttaaatgtacgcaggtctgcatactctgaaactgtcacattatcaacaacttcattatttactttgaccttcaggattgcatttcctttgatcttttcacttaactgtacccgaagctctgttcctgaaacacttgtcagactcttgaatgtcggtgcagttgtatctgcatcctggctcagagaccatacctgtacttctcccggctgaagtgtaacagatacttcttcaccctttgtataagtatcttttgctgtcgcaatcgttccattcggagaataagtatgtactgtactcatgtggtaagtaccggcttttgtaactccgattgcatcattcagtgtaaatgtgatcgtcttctctgttgcagacgggtttctcatggaaatgattcctgcatttccatcgaagcatgcaaatccatatggattctgtacttcaccgctgctcattccaccatttctgtaagtgctgagtcttgttgcactggatggatggctaccgatcatcttcgcattcttcagcttggagaaattttcttcctcccactcaaggaactctgcatttacaagatatttatccttgtccagcagtgaatcagagtaataaagctcccagaatgcagttcctcttgttcccatcatatacaggtaattcttgaactgttctgctgtcatggagttagctacgattcctgttccttcacttccgtagatcgggtcatggttataaagatttgccaatgggaactgaaactggtgtacctgaacaaactcatagtagttcgcatcacggtaagtcagcatattgtccatcttattattcagcgtaccattactgatctctccacggtctcctgcacactgtaaccatacagagtttgcccactgtaagaaccatggacttgggtttacataacaggtcagggaaatccacaagttcttaatattataatctttctcagcctgacggacattctccatcagcacgatccatttctcccaaaggtctgtcacatggtacatctgattctgtccaccatacatatggcggtgttcctcactgtatcctacaacaccttctcctgacgggaatgcattatactgtgcaacatctgcaaatccatcccacttccagtagttcactccatagtcgtgcatccagttgatcgccatttcttcaaacttctgaacataagttgcatctgcaacatcaatggaaccaccggatttacttcctgttccgctctttgtcaggatatctgccagagaaccgaagaagttgtatcctcctcttggtccaatccatacaccgaaatcagatcccagtttatttaccagggaactggatgtcgtcagtccattcgggaacttggagttaaactcccagaatcctgttgtattcagggtcgttcctgaacgtacggaatctacaaccgatgtatcattgtagttgttccatccatcatccactacataggaatccatcgggcgaactccggtctgtgtcagttccttctcgatttcaatgaatgaggaaaggatattatcatcatcaattctcatcatgttgtcgaaccaggagttgtactgcagacggaaatctgacggagttgcaatactgtcgatataatcataaaaatcactttggatgactccctgatcacttccgtcactatggcttgcaccaacaacggtctgccaggaaatatactttccatcctcagtcagctgtccgtctctctcaaaatctgtaaaattctttcctgcatagtagcgtacatgtcccaaacctgattcaatctgtgtatcagtttccgggaattctgatcccacaaacattccatcaatatagatcggctgtccgagatttgccttatattcgctcatctctacaacaccgccgactcccttcggaacagtccatgtcttatcgctgtctgtgactgtcagatgctcgccatcgatataatccatgcggacatccttatcttcactgtcaatctccaggaacttacgcatgaaatgatccccatcatacatgacaatcttttctgtaatattggcttcgcctgttcccatctgaaccggatcaaattcaaaagtaatcatcttaccggtcttattgacatcattaatcactgctgttgtatcatcaatcgaagtcgatttcagtgtcagttcactggatttgatttcttttccggcaatctgtgtacctttgtcaagaacagtcgttccggctgtatcctgcacatccagttctccgacattcataaacttattccggtttgcatcctgccagtggtaggactcaataccaaccagtttgatcttggaggtcgtcactgtttcatccagctcgatcgcatccggctttgtatttgcatcggttgtcagtgaaatttctgcatttccaccaaccattgcatcctgccatgcactgccatcccagtactggatcttcagtttggtcagacgtccggtacagttatacttcgcaccattatcataacgcggtgtataaaccactttttttacttttttttctgatccaaaatttactaccagtttcatatcatccgaattagaacaccagaaattgcctgttgtatcggtaatcccgtctaatatctgactgctatttccctcactggtcgtatattcttccaatgaaactgccccgttacttgtctcatccagcgtcttaatcacaaattcttctgaattttctcccggtgttaacactgaatttccaagcaggttctcaatttttgtcgtggaaagcctgtcatcagaaatactgaactcacggctgatcttatcatttccaatggtcacaatatttccactcttcgtagcactgactgcatcctgtgcggcttctacttcagtcactgcaagcggtgagatctgcacacagcttaatgctgtcacaagtgcaaccgctttttttagtttccctttcatcatagaaacttatctccttcctccctttttcgtgagtatcttatttatattaagatacatcctactttattgtatctcttttttcctctcaaatcttgtcaccccccccccacatttttttgctgttttttgtctgattcggaactattcggatctgtctcgcatccgtttagtgaaagggatttgattagactggtatattaataaaggtgcttatgacctgatatcctatgcatcggatgatctaagacaggtcataaacaccttactttattattagaaatgatgaaaaactattttcaattattatcccagcatttcccggagcattttgttgaccattcccggatttgcctttcctttcatggctttcatcgtctgtccgaccaatgcaccgagtgctttttcttttcctcctctgtaatcagcgactgcctgtggattgtcagcaatgactttctccagcgtcgttctgagtgcatctgcatcattgactgtcttcagtccatgctcttctacatatacatccggctcaatatcattcaggaagatctgttcaaatacttcttttgccacagaactatttactgtgcccgcatcattaagctcgatcagtttcgccagattcaccggtgagaagttcaggtcttctgcttccatgctgtgttccttcatcagacgcatcgtctctaccatcagccagttggatacttttttcggcttattgcagattgcagttgtcgcttcaaaaagatctgccatatgcttggattctgtaatgatctctgcatcatattccgggatgtcaaattcttttttgtaacgctccagcttctctgtccgaagttccggctgctgtgccctgattttttcgatccattcgtcactgatcacgatcggaacaagatccggttcagggaagtaacggtaatcctgtgcatcttctttggaacgcattgcataggaatgttctttattatcatcccatcttcttgtctcctgggtcactgcttttccttcttccagcagctcgatctgtctctgacgctctccctcaattgcatgagcgattgctttaaaggagttcaggtttttcatttccgttcttgtgccaaatgtatccgaaccaacttcccgaacagaaaggtttacatccgcacgcatagatccctcctgcagcttgcagtccgatgcccccagatactgtacgatcatacggagtttctcaagatatgcgatcacttcctcagcggaacgcatatccggctctgatacaatctctaccagcggaactccgcttcggttataatcaaccagtgatgtatcatcccattcatcgtgaacgagctttcctgcatcttcctccatatgcatttcatggatccgcacttttttctttccgtttccgctttcaatctctacatatccatctcgtgcgattggaagataaagctgggaaatctgatagttctgcggattatcaggataaaaatagttcttgcggtcaaatttacatacctgcgtgatcttacagtttgttgcaagtccgatcgccatcgcatattctacaacctgcttattcaataccggaagcgacccaggcataccggtgcagaccgggcaggtatgcgtattcggtgccccaccaaattcggtactgcatccacagaaaatctttgtctttgttgccagttcgatatgaacttccagtccgatcactgtctcatactgctttgccatgattactgtacctccttttccgctgtccgtccgatctgtgcaggaacctcatgcactttctttgtcgcacattcataagtatatgcggcacggatcagcgtcttttcgtcgaatacatttcctatgagctgcattcccactggcagccctttgctgtcttttcctaccggcacactcatgcccggaagtccggcaagattgacagagatcgtataaatatctcccaaatacattttcatcggatcatccagactctttccaagctccggtgctgttgtcggggctgccggtcctaagatcagatcgtatttttcaaacgcccggtcaaattccctcttgatcagggcttttgttctcaatgctttcagataataggcatcataatatcctgaacttaatacgaaagatcccagcatgatccttctctttacctctgctccaaatccttcggaacgggtctttttatacatattatgaagtccctcatactctttggtccgatatccatattttactccatcgaaacgttccaggttggagcttgcctctgctgctgcgatcgtatagtatgccgggatcgcgtattttactagtcccagatcaaacgcttctaccactgctcctttttcttccaggacttttgctgcctgcatgactgcctgattcacctcaggatccagaccctctcccatataatctcttgggattccaatcctgagtccttttacatcttctaccagtgcttctgtaaaatcacagtcatcccgttcgatcgaagtactgtctttctcatcgtgggatgcgatcacttccaggattgccgcacagtctgccacatcctttgctaccggtccgatctgatctaatgaagaaccatatgccaccagtccataacgggaaactgttccataggtcggtttcagtcccactactccacaaaaagaacttggctgacggatcgatccaccggtatcagagccaagtgcataataacattcgcacgcagccactgccgcacaggatccaccagaagaacctcccggaacatgtgctgtattatgagggtttttcgttggtccataataagaagtctccgtcgtacttcccatggcaaactcatccatattcgtctttccgagaatgacggctccggcatttttcaggttttcaaccgcctgtgctgtataagtcggctgaaaacctgaaaggattttggaactgcatgtggtaagctgaccctcaatgcacatattatctttaattgctaccggaactcctgccagcggtccggtcagttctcctgcgtcgatctttttctgaatttcatctgcctgtgcatatgccccttcttcatccagtgtcacataactgttaatcgccggttctacttcttttgcctgctcgattactgcccggactgcttctctgaccgtcacctcaccggcttttatttttttgcccagttcaagggctgtaagttttaataaatccatcttcatctcactccctttaccctatcgtcttcggcacttcaaagctgtcttctttccgaagcggtgcatttgccagtgtcttctctttattatcaccatttgttacaacatcttccctgaatacattctgcaccggaaatacatgagacatcggttcaatcccggtagtatccagttcatttaaagtatctatataatccagcatctgctccatatcgcttttggcggcttctttttcttcctccgaaagttccagttttgcaaggattccaacatattctatcgtttcgtctgagattttatttgccaattctgtcaccctttctcacttcattttctgtaaatatcataaaatgcctcataatcctgacttccaatctttttggatggtgtcaggatcatttttcctgtcacggtgatttccgttccctccgtcagtactgcatttttatagattgcattttcacttcccgattctaccatgatcgaataattctgataattcaggctgtcatattcctcatcatacaattctccgagatagatctcatactccatcacagcccagtcttttgttccggagacatcatacactcctgccggaatctcttttcccacagtatacttcttttccggctggagagtatacatcacactcagcggattatcttctgactgcatctgtccggtctgaccattttctgtatggaaggcgagtatcacatcttctccgatcatgacatgggctccattatacagtctcacatcttctttttcagtgatatctccattctcctccgacgcatcttcagagaaataaccatacagataaatagaattttccggatcctgtgtctggaaagaaccgtatcctgactggagcgttacatcataagttccttcaggaagatccgttccgacaacatattcaccatatccaagctctgtatcgtaaacctctccatgatcagacagttctctcgttacaaactcatacggatctgtctcatccacacttgtatcaacatctgaaccatcccaccagttatcgctatcggcatcatcaaactggtttatcacattttctatcacagtttttatataacttaccgcaggtccgccaacactgatcagaatcatcagcaatacaatgaccgttgaaatccatccctttttctgctttcctgccgttttctttttcctgcccgtctgcgtccaattctgtccacgctgccaggaagtctgcccctgctggttctgtccattctgcctggaagtctgctcctgctggttctgtccattctgccaggaaacctgcctctgctggttttgtccattctgccaggaagtctgcctctgacggttctgcccgccagactggttcgtatgtgaaccggacggctttccgttatgggattcacataaatgctttgcctcaattccttttctgtcaaagctgctttcattcagacggtaatttttccgctcaatttttgtattatcaagaccgcaaagtgtacatcttccatttacgagttttccaccacaaagataacatcttctctttttcatctgaactcctccgcttttctgtccacaacggtctctcgctttccatgacgatcactatgactatcttcctgcgacactttctgtctccatctgtgtatcgctatctgtctgctgcacgctctgtctgctactatggctccaatctgctcaaatctctcgggaacaaggttgtctcacgcacattatcttcgttcatcatcttcatcgtcagacgttccataccgattccaagtccaccatgtggcggcattccatgcttaaatgcacttaaatactgttccattccctcgtccgtcatgccacgcttttccattttcgcaagcagctcatgataatcatgaatacgctgtccgcccgttgtgatctccattcctctgaaaagcaggtcaaagctgagcgtataagtgggatctgccggatcatccattgcatagaacggacgcttcttggacggataatgcgttacaaacacaaaatccgcatcccattcttcttttgcatatctactgatcagcatttcctcttccggttcgagatcaaatggattcttgatctttcggtcatacttttctgccacaagtctcttgatctcatcaaatcgtacagccggaatctctttcgtctttggtactttaatatccaggatcttcagctctcttgcatactctttttcaagcagagccatcgtatactgaagaaatccggtctccattgccataatatcctcaaatccatcgatatatcccatctcaaaatcaaggctggtgtattcgttgaggtgtcgcttggtattatgcttttctgcacggaataccggagcagtctcaaatacacggtcaaaaacgccaaccatcatctgcttatagaactgcgggctttgctgaaggatcgccggtctgtggaaatattccagccggaagaggtttgctcctccctcagcacttttcgcaccgatcttcggagtatggatctctgtaaatccttcctgataaaggaaatccctgaaccctcttacaataccttcctgaatcctgaattttgcacgctctctgatatttctcagagaaattggtctgtaatttaattttgcttccagagatgtattcaatttccattttgaaatcggaagcggcattggctctgcaggctcacttaaaatcttcagttctcctaaccggatctcaatcccgttcggagctttttccgatcgctccagcatccctgatacttctactgtatctgcttctttcacatctttcaagttaaattttgaaactccttcttcataaacacactgcacaaggccttctctttttctcagaatgatgaaagcaacggttcccatatctctgatcgtatggatcgcaccattcactctgacttcagttccgatcctgcctgcttcaagcagttcacttaattccagcgtctctttcttttttactcctgttacaaactccattttacttctcctttcagattccagcatcccggtgaagctttttctgaatagaaaaagtcccgggatacaacagtatcccgggacggaaattatcaatataatatccgcggtaccacccgcattgaatcctccgtctgctctttcgtcagttctttcgaattcccctctttgcagataacgcctgctaaacgtgctgtcctactgatctttcagacagccggctcccaagtgttcccttgatctgctccgctgtccggcactctcagtcggtgatgcctgcttcctgtcagtttctgaagatcagagtcttgctccacgcctttatctattttaacacgtcagcttgttaaaacttggtttaaatattagcacaccacttttttatttgcaagttttttttattttttttcagtctttttttggacttcacttttctgctctattttaattcttcgctgactgtctccaatgctttatccaactggttatccttctttggatcagcttcgtcatactgatattctacttctatatcgggttcaacaccctttttgtttatactccttccacttggagtataatattctgcgatcgtcactttaaagcatgttccgtctcccagatccagtaactgctgcacaactccctttccgtatgtcgtcaccccgacgatctttcctgtgccataatcctgaattgcaccgctgaagatctcagatgcacttgcactgtactggtttacaagaactgccagcggctttttgaattcattcgtaccatcgcacgtgatctcatccgtcttaccatttttatcttttgtggaaacaatcgttccttccggcagaagaagcttcagcatgttgcagacaacatccagattccctcccggattatttctcagatcgatcaccagccctgccattccctgatcttccagatcatccagtgctgctttaaactgatcgtatgtcaccagatcaaattctgacacacggatataaccgatcccgccatctttcatctcatactcaaccgtctgtgcttcgattgtatctcttgtggcagtcagtgtctcttccttcccgtctctcaggacatataatgttacttccgtacctttttcccctttgatccaagatacgatcgtatccagttcttcatcgccgacttcatggtcatctactttctccaggatatcccccgccttcagacctgccttttctgccggagaatcctggtaaacatttacgatcgtcactgcctttgtatctgcatctcttgtcagcgttgctccgacaccggaaaatgttccactggtagattccatcagagctttcgtctcatccttattgtaataaactgtatacggatctcccagtgctgctgcataacctgaatagattccctctaccagtgcatcctgatccacttcatcctgatacagataatatttgtcgatcagttgattcagttgatccagcttctttgacacatctccttctgttacattttctgatgtataagaaccgctgctgttccggttcacgatataccatcctccaaatccaaggatcgagatcaccgccatgatcacaattccggtcagcagtcctgccgcaaaaccacttttctttctgcctgtattttcttccattcctgactcctttcatccttttatattctatgcacaaagaggacaaagcagacattgatccgctctgtcctccctcagttcttcctttgatgacgtatctgtcatcttctgcttctggtcagcatactacaaatatgtatttggatttactgctgttccatttaattctacctggaaatgcagatgtgcaccactcgaatatcccgttgatccaacatatccgatctgctgtccttttgcgactttctgccctgctgacacgcagattgcactatgatgcatatatttcgttacgagaccatttccatgattgatcacgacccagttcccggcactgttgctccatcccgcgatcaccacagttcctgctgctgccgcataagtcggtgttcctgtcggagctgcataatcatttcccttgtgaggtcttggatcaaatgccctgacttcaccgaaatagctggactgataagtcatacccggacacggatgcgtaaaatatccatttccactgaccacattcccactggacgacggcttaaaagaacttcctccactattcagctttgcctgctcctcctgcagccgtcttgcctgctctgctttctccttcagctctttgagcgtatcagcattctgctggatctgcgtctggatacttgcgatctgtgcctctttactgctgatcatctcctgagcctgcgtctgctgctctacgagctgactttgcagcgtattcagatttttatattcttcctgaagctttgcctctttgtcctgtacagttttcaccgtatcctgaaactcaaccagcatatcccggtcataagaagacagctttgccacatactcggctttattcagcagatctgtgatcgaactgctcgtcatcatcatttccagaaactgtgtattaccgccttcataaagataacggatccgctttttcatgctgtcgtactgatcatcttccgcaatctgagcctgaatcaattcattttccgcatcggagatttcatcctccttggcggtcagatgctcctgcgtctcattcattttcttaatgatctcatccagtttctccgacagcgtcttcttttcttcttctgctttctttttatccgattcaagctgatctgcttttttctcagcttcatcgatcgtaaccgcaccggactgcgatgccgttccaatacaaaggacgaacgccagcaaaattcctgtaattttcctcatccggcctttcataggcttcctcctatactctcagatgcttgcgtactgtaaagaagcttccaaggaaaccaattccgatccccatgataagtccgattggcaataagtaggtatatactacatttaccggaaggaaatcaataatattcttcagaatactgaaccgttccatgacataggaaactgccttatcataaagtacatataaaagtcccagtgggatcgctgcaccaaagataccgatgatcagaccctcgatcacgaacggtgatcttacaacaaagtctttcgcaccaatatatttcataatagcgatctcttcttttctgactgtaatacccattgtaaccgtattgctgatcaggaagattgacactcccaacaggatcgcaatgatcgcaatggaaatatacgcaaccagcatattaacgctggagagtgtattcgctacaacatctgatttatttactttcgacactccatccagactctgtgcaaacttaaccagatcctgctgcgtagaagaaagagatttacttctcgcgatcagatcctggttgttgtctgtcgtcttcatataaacttcatagttatctgaattggccagcggattgtcatctttaaatccttctgcaagctccgggttagctccaaaataatccttctggaaatcctcccatgcctgctctgctgaaatatattttacttctgaaacgtcgtctcttgctttcagttcctccccaatcttctgaatctgttcatctgtagcttcttcatcaaagaagaccgtgatcgccacaccttcctcagcacttcggataatatactgaaagtttacaagaatcgagaaaaataatccgaacaggaagatacaggctgacatcgttgcaatggatgccagagagaacatcttatttctccaaatactcttaactccctgctttccaacgtatccaatcgtactaatcctcatctgtatacccaccttttcgttcatcactgacgatgacaccctgcttcatagtaatgacgcgttcgttcatctcatttacgatctcctgattatgcgtgacaacaagcacggttgttccacgctcattcgcctctttcagaaggctcataatctcccaggagttcgttggatccaagttacctgtcggctcatccgccagcaggatggcaggctcatttacgatcgcccttgcgatcgcgactctctgctgctctcctccggaaagttccttcgggaacgacttgtacttctgtgcaagtcctaccagtgacaaagcagccggtacttttttcttgatcactttgctcggtgtctctgtcacccgcagtgcaaatgcaatattctcataaatattccggtctttcagaagccggaaatcctgaaatacaactcccagtcctcttctgtactttgcaatattccggtgtctcatacggtttaagttttgtccgttcacgatgatcgtaccatcggtcggattcagttctttcatgatcagacggataagggttgactttcccgatccactgtcaccaacgatgaagacgaactctccccgctcgatctttacggataccccgttcagagccgcattgcccttggagtattccttcttcacgtttcttaattcaatcatatgttcctcctaattatccatactccgcaaaattcctagtattctaatgactccatgtacttcatgtacttcactaccatcagagcgatcttgaacgtgatcgcatcctcaaagacacgcagatcaagtcctgtactcttctgcagtttatccagtctgtataccagagtatttctgtgaatgtaaagctgtctggatgtctctgatacattgagactgttctcgaagaacttattgatggtagtcaatgtctcttcatcaaagtcatccggagattttgcttcaaaaatctccttaataaacatcttgcacaacggaagcggaagctgatagatcagtctgccgattccaagagttgtataggcaacgatatctttctcgctaaagaagatcttgcccacatccaacgccagcttggcttctttataagacttggaaacttccttgatgtcgttgacgatcgttccatatgctatatgcacccgctcgtcgcctccctctgaccggagcagatctagcatatccttcgccattttttcaagttctttatttccatttttctctgaaagttcttttacaacaatgatattcttctcatctaccgcagttacaaaatcgcgggatttgcctccgagaagattccgcacattgtcaagagccgcactgtctttttcgtgggatgtctcaataataaagataacacgtttcacttccgtgtcaatatgtaatttttgggcacgattataaatatccaccagcaaaaggttatccaaaagcaggtttttgataaaattatccttgtcaaatctctctttatatgcaaccagaagactctggatctggaatgctgcgatctttcccagcatatattctccctcgctgtctccattggcaacaagcacatattccagacgctgctcatcaaagatcttgaagaactgtcttccctggattacctgactgtctgcgggggactctacaaatgcaagcactgcatccgaacagttcttatctacctcgcctgtagctgccagttccttcccctctgtatctaacacacaaaaatcaaccttggaaatccctttcaatccttcaatcgtattctgaagtatctgattagaaatcatcctttttcctccattccatccgttcttcgatatgtgcaatttacacatacctttcgtgtcgatttttttacgtacacatttccacttagtatattaagtcaaaacagcaaaaaaataaagagtaaatccttttattttagtcatttctttgaattttttacaaaaaattcatattttcagacttagcatagttcacaattttccgaatatagatcttatttccaggcaaatccgttattctttttcctgttctacatgatatctgaaaattttcttctgaataaaaaaacggatccggttcctcaattttatctcatccagatgccctgtaaacgcacagccgcctcccagccagacccgtacattcagaagggctttatttgccgtaataaaccgttcctgaaacggggacggcagcaccgacaggatacagtccgtctccgttccgttgatggcattgatcgcatcctggatctgctcttcattctccgaaatcaccatctgcccggtaacgcggattccccggttgtgcctggacagaaccgcctctacttttcccagattttcctcactgtctgcaagcaggaatatttttttatgatttttttgcatatacttcatgaacatcttaaggaaaacgttctcttcagtttcccggaacagcttttcattttctatctctgccgctttcaggatctctgtattctccggcagcagcatcgtcagtgcattgatctgctctttccattgtgcattttctctttctttcatcagcatatccatggaaaccagctcgatcgtatccactgactcactctcgagatactgcattgcccggatcatcgcttcttttgctgtcaggattggaatctccacatcaaatatattcatcttttctatcataataaatcacccaaccatgctccccattctgagcattttatcaaaaatgagtggttttgtcaaaataagacctttctgcttccggttttctatattttttcctccgtctgtgctgtcccgttctcctgcgtccgtcttctttttgtcaccagtccgccgatcctcccggtctctttggaagtaagtgatttccagccctgtgcaagtacccggtctaacagtcccagttcttccgcaatctcatacttcattttttcttcctcttccagttcgtttaaattgatcggtttttcttttttctttcccatattctgccttctttctttttttagaagtatttcccgatcagatcagattatactgaaaaactgattcctgtcatctgcccgtaaaacgaacaggacggagcagataccggtcaagtatctgctccgtccctctttataagatgatacaaatataagtgaatcgtcaattattcgattgcttctgtctcgatcacaaattttacacttccatccatcttgctgtccttaccactgaatgtattgtaggtgcagtcatcagaggtcagtgctttgagtctgtcaagtacatctccgaattcgtcttctactgtactctttaatttacttgttccttctttatcgaactgatccataccatctgccagcttctttgctccttctgaaagtgaggaagctccttcacgaagtgcattgctgttggctgaaagtttcgctgcaccggctgacatctgtgaaccaagtgtattcagaccggatgcaagctggttcgttccgctctgcagcgttcctgctccggctgccagtgttgaactgcttcctttcagtttctctgcacctgaaagaagagaagtattataagatccgagctgcataaatccgccattcaattcagtaattccctggattgctgtcgggaactgtgcctgaacagatgtattcaactgtccaagtccgcctgaaagagttccaagtccggtattcagtccctgcattccctgattcaactgagtcacagatgctgtaagctggctgattgaatctgacggaagactgtcctttgctgctgcaatagcatccagtttcttctgcatttccggaagctgctgctgtaatgctgctgcagtctctttaaatgtcttcagatttgtctgaagcgttgctgccccgcttgtgatggctgacaggtcaaaggtcggtacactgaccgtgatcgcagatgctttctgcacattgttcagtccgtctgcagcagtctgtgcattctgaagtgccgtaattgctgtactgatctgatctcttactgactcatctgttgtcgcatttaactgaacctgcaatgcactgatcgcatttgcaatctgcgtcttgcttgtattggctgctgcctgtgctgcatccacttttgtattgtaatctgtaatcttcgcattgacatctgcaaccgctgtctcacagtcactttgcagtgttccgagctgggtattgattgcattgagctgtgtttccattccggtcagtgctgctgcaatattggctaccggtgtggcaattcctgtctgaagacttgcagaaagagattccgttgcagaaatcagttcatttccggttgtcaccataccattcacctgcgtcagaagtgctgtcacttcctctgagccaagtactgcctgtaactgctttgtacctgctgcaagctggttggctgcgatcaccagatcgtctgttgcctctccttttccgtcagccgctttgctcaatgtatctacggctgtctgcacctgctccagacctttgcttaactgagataactgtgcggcacctgctgcaatcttctgctcgcctaccacataggaagtcactccatttgccagtgcattagttccacttgtatagtctttaacgcctttgacaactttgcctactccattgacatactctgtcacgctgccgttcagttctccgttgctgccaagatatttctgaatgcccgcattcagttcatctgcacctgctgtatagctgctcactccgtctgccagtgtggaagcaccatctgccagtgttcctgatccgctgaccagttccagtgcagcatcttccagctcattcagtgaatctttcagtgaatcaacatctatgatattatccatatccatatcatccagcagatctgtcagggcaactgtaaaggtggaagacattgtgaaatcagttacatctgcctccatctcaaaattctctggaatcgttacgcctttatcctcagcttcttttgttgtctcttcatccagatcaaggctgtctttcagtcccggcataccaaatccgactacaatattacggcttccgtctgaaataacttttccattgtcgatcgttacattgctgaaagtttcattcggaaggatcattccggtcatcatgataaatggtgtataaacttcctcttcttttccatccactgtgacggtcttcttttcgttatttgtatactgtacctggatcttgagatgtccgctctttcccttcagctcatccggttttacttccttgccgtccaaaaaataggtcagttttacggataccggaagttccttatctgtcgtaccctgataataaatatcttctcccgcagtattccaggtcagttgatctccattctccgtaaatgtctcatcacctttgacattcttaatctctttcaaaatactttcatcagtcaggtttcccgatacacttccagaatttttcagccagtcagataccgtcacctcgtcactatttcctgtcgcatctgcattgacataaaccgtttcttccttatatacatcctgcgtatctgtgctgcctgccgcataaaccggaaccgctcccatcatgactgacattccaacagcaagcgaagttgtaaggctacgtttgatttttctgttcttgttcataatttaactcccttctatttcacctctgcgggtttcttttttgccccgaggaaaccaatcgaggtcttgcatattaccttgtcaaatatcataaacattgcaggcaggatcatgataactacgatcatactgatgatcgctccccttgcaagaagggtacagatcgaaccgatcatctctacctgtgagtagcaggccactccgaatgttgctgcaaaaaagctcagtccactgctgataatagacggcatactggtcttatgtgcaatactgattgcttccatcttctctcttccacgctgacgttctttctgataacgggttgtcatcagaatcgcataatctaccgttgctcccaactggattgctccgattacaatgcttgccacaaacggaaggctggttccctgatagaacgggattgccatattaaccatgattgcaaactcaattaccgctaccagaataatcggcagggagatcgacttgaatatgatcatgataataaggaaaatcgctgcaatggaaatagcatttacattcactaagtccacatctgttacatcctgcagatccttcatcagtggagcttctccaatgaccattccactcttgtcataagacttcacgatcttatcaatggctgaaatctgcgtattgacctcatctgttgccgactcatactctgagcatacaaaggcaagttcacaatcatcgctctgaagcatctctttcatgtcatccgggatcatggaatccggtacggtcggaccgatcagagaattcatgctgattgtccatttgacaccctttacttcatcaatctcttcaagcatcttctttttctgctttgcatccatgttcttatccatcatgaccatgtgcagattgctcatattgaaatctttcttcagttctgcattcgccacattactgtccaatgtctccggaagagactctgcaatattatagtagatctttgtatgattatttccgtaaatcgcaggaaacagaaggatcaggaaaataaggatccatgccttataatgctttgtaataaatgcagagggcttatccatgttgcttaaaagcagtttatgctgagtcttttcaatcggtttgtcaaaaaccagtaccagtgacggaagaactgttacacagcaaaccactccgatcagtacacctttcgccataacgattccgagatcccgtccaagtgcgaaagtcattacacacagggcaataaagcctgcaaccgtcgtcacagaacttcctgcaacagacttaaatgtattggcgatcgcatgccccatggcacgctccttttctcccggaaatcgctttttattctcctcataactgttcagcaggaaaatggaatagtccatcgtaactcctaattgcagaactgctgtcagtgcttttgtaatataggaagtctctcccagaaaaacattacttcccagattatagagaatcgccagtccgatactcagaaggaacaagatcggaacaacgaaagaacccgaagtcagttccaaaacaatcagacttaaaagtgctgcgatcacaacatagatcggaagttctttcagtgccagattcttgatatctgctacaacacctgtcattccactgataaagcactgctcatttgcaatctttctcatctcactgactgcatccatggattcatctgaagatgtcgtattatcaaataatacaagcatcatcgttgcatcacctttgaaaaaggcttcccgcagatcatctgggatcatctctaccggaaggctgatgtccgcaacatcgtcataccacaaaacgtcctttacatgagaaacattctcaaatttttcttccagtttttgaacatctttcatatccatgttctcgaccacgaccatggaaaatgctcccatgccatactcatccaccagaatatcctgaccttttactgtctccagatgttctggaagatagctgagcaaatcataatttactcttgtctctgccatcccgatcactgacggaatgatcagcaggaatccgacgatcagcatcagaaccctgtgcctggcaatccatttgccaactttgaccatttgtatcatctcctaaactgtctcatatattttagcctcttctagtatagctcgaaatgaccaacagtcaatattagaaagtcaaaaaactgaattttagtcattttttattgactttcacggaaaacgtgccatactagaaagagaaatcagtaaaaaatctgcttgaatttctgcagaatctggtagtaaaataataatttggtatgcagacagatattttaatttgataaatttatcgtcatgaatttttagatgccagggtcaaaaggtctaagcccacatgagcttgctcataggtgggtgaaagaccttaggacccgccccgatatgagcataaaagtggggcgtacgcaccatgatatgcgaatagcgggtaggattgtgggagtgcgtagcacgaaacaatccgttggcatcaaagtcgggggcttttgaccccgacatcatttttattatcataaaggaggcaactggatatgggaaaagtagaagataataaaaaattgaaaatgaatacactacttcagacagcatttgacctttttacaggaaaaggctttgcaaagacaaccgtatccgacattgtaaatcaggccggactggcaaagggaactttttatttgtattttaaagataaatatgacttgcgggataagctgatcgcatttaaagccagccagctttttgacgatgcacataaggcactggatgctgccgttatccctgacttcgaggaagaaattctttttgtaacggactatatcattgaacgctttcaaaatcagcagggactgatgaaatttctttccaagaacctttcgtggggagtatttcaggatgcggtcggaaccggatcgctggtttcccagaagttttacaaccactatctcgattccttacagcggtatcacgtagaatgttcttctccaaaacttttactcttcaccctgatcgaatttatcagttctaccagctataattgtattcttcataacgagccggtgtcgatggaagaatatatgccttatatgcacgccgcactcaggcagatctgcaaagtatatattacagaaactccggtttaaaaaaagaatgttgggagcaaaagccctcaacattcttttttcagtttttctcacgtagatcatttcgttaagacattgcctgatacggagaacctttttaccgataacctgaaacaatttctgaaacaattcctaaaataattcgtcaaaacgcttcattgcctcggctgtcttctcatgctttccaaaggaagtcagtctgaaataattctttccattctcaccaaaccctgctcccggtgttcccacgatctgtgcattctcaagcagataatcaaagaactcccaggattccatctctttcgggcatttaaaccagatgtatggagaatttaccccacctgtaaaccagatatttttcttcttcagagtttctgcgatcatacgtgcattctctctatagtattcaatattctgctggcactctgccatgccctcttctgtgaagacccttgctgccgcatactgaatgatatatggcgtaccgttaaattttgtagactgccttctgttccacatgtcatgaagacttaatgttgctccattagaagccgtaaacaccagctctgtcggaacaaccgtataggagaaacgagttcctgtaaatcctgctgtcttggacagagagcaaaattcaatcgcacattcttttgcaccctcaatagcataaatactccgtggaagatcctgatcggtaataaatgcctcataggcagagtcataaaggattaccgaatcattcttcagggcataatcaacccatgctttcaactgctctttattgtagcttgctccggtcggattattcggagaacaaagataaatgatatctgcctttactttatcatccggcatcggaaggaagtcattttcctccgttccgttcatatagatgatcttctttccatccatcgtatttgtatccacataaaccgggtaaaccggatcagggacaagaactacattatcatttgaaaaaagttctgtgatatttcctgtatcgctcttagctccgtctgaaataaaaattgctgcaggatcaacctcaatgccattccttgcataataatctgcaatcgccttgcgtgcaaactcatatccctgctctgggccatatcccataaatgtctcagacaccgcctgggaatcaactgcctcatgaagtgcctcgatcacgctcttcgtaagtggaagagttacatcgccgattccaagacgaatgatctgatctgctttgtccggatgcgtttcctcatatacttttactcttctggcaatttctgcaaaaaggtagctgtcttttacattctgataattttcatttaactttggcatttttctctccctttctttaaccgactaaagtactctgtaagtaatattagcagaatttctccaattagaaaagaagctgactgcaatttctaaaaatccattctctggaccgctttttctgactattctatgtgcaatttgtcacaatttcagaaaaatatatacaaagaaaatactttccactacaaaaataaccggtactccaatcatgaatttcagttttcttgtcttgtgccggaacatcagcatccctgccaatgcccctgtgcagccaccggcagccgccaaaagcaacagtgttctctccggtattctccacgcacgtcgctttgccttccacttatcaattccgtagatgatccaggtcaacaaattcaccacgatcagataatacataagccatttcataacctgatctcctctcttagcgtaaatgaatagataatcttttctttcaccggtttttcaagaagcccctccaatgcctgtgcataatattccaactgtgcatgataacgttctttcaactgctctgcactcttcaccttgtccgtcttataatccagtactacaatcccgtctttctcttcaaagtaagcatctataattccctgaacaagaatcacttccttttcctgacttcctggctcaccggaaaatcccggatagacctgatctgcatccacccccagtacaaaaggctgctctctccataacttcccttttccggctgccgctgacattctttttccactgctgctttccaggaataataaaatatcagatatacggatacacgctgccatctccgaagtcatctttttctccttttcaaaatcatgcactgcatttttcaaagcagctttcgtatattgcctggtaaaatctaatagttccataagcttatgataagcagttcctctggacgccccggtcagaccttctttttgattctgcataaatcccggtactaacggaacaatttccggttcctgatacagttcctcgccaccgtcttcctgcatttcacgcatctgttctcctgcgtaaattctctttttcagttctgagactgtaaatttcaatttcatctgctcttcctgtaaatatggataagtataattcatctgttctgacagaagctctttccattccggcatatacgacttttctgtatcccagtgttccagcacttctctcgccagtacttctgcccgacctgctgttgctgccccataggataattcttctcttgtaacaagccgcacctgtatccatttttctgcctttttccaatctctcatcagtgccggtaagatccagtcaaagcaggtctttgccccttccatctgatacagtgcaagcgaatctttttcatctgctttccagctattctgcttttcttctctttttattatatcttccatcatttccaatgccagaagttcttcttccccaagcttcgctgtaccggtcaggatcatcttctcttttgccctggtcatgccaacataaagaactctcagttcttccgaaagattctccagctttgttttttcctgtatcattcttttcagaaaagttggatttttcgttctctgttccagatcaactgcatcaattccaattccccagtccggatggatcacaatacttcccctctgatcctgcatattaaagctttttcccattcccgctacaaatacaatcggaaattccagtcctttacttttatggatactcatcaggcgtaccgtatctgcctgttcatccataattccggcttctccataatcaacattatattttttcaactgctcaatatatctgacaaaattaaaaagtcctttataacttgtcccctcaaatgcacacgccttttcaatcagcatctccacatttgcaatccgctgctctcctcccggcatcgcagcaataaaagtccggtatcctgtctcttcaaggatctttgccagcagatcatggatcggagtataggaaagtatgcttctgaagtatctgacctgcctcgtaaactctgccagcttttctctgaccgcttctgaaatctctccgctgcggttttccgcttctgcatctgattttttcttttctttcttttctttttctccggtttctccactcccgtctgctccggtttcttccgttttttcttccccacacagccagacagactcgtaaaatggcagattcggatatgccagccggatctgtgccagttcttccgcatccagcccgacaaatggtgaagtcaacactgctgtcagtggaagatcctgcctcgcattatccagaatccgcagataatctaaaaggacactgatctcatacgtttcaaaatacccctctctgctcactgaatatgccgggattccttcttctgccagcactgctgaaaaaatttctgcccatccctggatactccgcgttaagattacaatatccttatactgtatctttcgaaaggaatcactgtctttatcgtaaatatatcccgatcccatcatttccctgatccttcgtgcgatcattcttgcctcagcctctttggcatctcttgtcttcatgtcctgctgattaaagatcagaacttctgtcttatccgtaaagacggcatcttccggtatcggtggaaactctgctcccgcatacagagccgcattttcatcatattcgatccctccaaattcccggaacatcagcttttcaaaaagatagtttgtactgtccagtacttccttcctgcttcggaaatttttatgaagatcaattctctgacagggactgctttccacactgtaagtatcatacttctccataaaaagttccggtcttgagagacgaaatctgtatatgctctgctttacatcccctaccatgaacatattatttctgcctttactcatccctgacacactcgtcaggatcgtttcctgcaccagattactgtcctgatactcatccaccatcacttcggcaaaccgctcctgatattcttcagcaaccgcagatggcacgattttcccctctgtatttctcgtcaggattgccagtgcaaactgctccatatcactgaaatcaatcatatttctccgccgctttttttcatcaaaccggtcagcaaactcctgtaccagtccggtcagcgtcctcattgcctgagcggaatcctgcatatctgcaatccattcatctgccgttgcatagaaataagatttctgaatcccatcaatcagagctttcaactgcttccggacagcctggacggatttccgcagctccgcatcgacagtctcatcttttttacccgaaagctttttccagttgaaatccatcagaacctcactcattttctcataagagtctgccctttccagctttttcagttctttttcatctgattccaatgcctctgcatacatatacggacctgccgggagctgacagatttccatcgcctgtctgaccagtccatacagatcgcccagttgctgtctgacacgttcttccactgtatgcaccattcttgaatcttccaaatgctctctgtctatttcataatcttctgcacaggagatcagccactgacgtggatcaggataacttcttgagtattcatacaactgaagaatcagttcctcaatctttttatccgttctgcctgttccatatttttccacaaattcccggaactcttcctcatcttttgcataatgttcttccagcatttcatccagtacatcctgtttaagcagacgtagctccccttcttctcccacacggaatgacggatcgattccgatcacatggaaatgatcccggattaccgacagacagaatttatgcaccgtagtgatcatcgcactatgtattaacgatgcctgctgttccagattcagatttcccggagattcttccagttttttttcaatcgctgccgcgatcctttctttcatttcggctgccgctgcctctgtatatgtgacaacaagcagcttatccacatccacaggattcttttcatccgtgatcattgagatgatcctctcaacgagtactgctgtctttcctgaaccggcagcagccgaaaccagaatatttctgtcacgcagatcaatgacctgccgctgttcttttgtccatttcactgccatactgcctatgtctccttctctatttccggcttttttactcccgacttttctttatccctggcttttctttatttctgacttttctttattcccagcttttccttcatacattcgactgcttcttccagtgaatatttctgcaactgacggtattcacacccttcaatccgctggtcaaatccgcagatatctttgcaggcacagaaatcacatcctgtatcctcaccaagcagatacggcaatgcacttacctctccctcatacatctccgctttcagttccttttgcttcgccctggtataagaaagtaccgtctcaaacttctcctgtggaagagcttttgatgtactcccaagtaatccattctgattcctgcggagcggataatataacgaacttcctgtcagattcgcctccagatgttcaattacttcctcttcaccattcacaagcccatccagtttcagttcttttaaaatactttcttccgtcttctcgtctgtcttttctcttgccacgatcggatcctgtatcctgtaataaaaaattcctgcaggaactatctcctttcccggatatctctttccctctgtttccagtgctgcattcagatacaccggcaactgaagctgaagaccatgatagaaagaagtaatatcaaatacctttcttcccgtcttataatctgtcaccttgacataaacccggttctcatcttcgcacgtatcaatcctgtcgatcttaccacttccgaatttaaattcgtatcctgccggtttaaaatctccctgctccatctgtcgggtcaatgcccatacagaccggcggatcagacgcttgatccgatagatcatatattcatttcttgcacttgaaaacaggactgtatttccataatccagaacgctgctttccacactttcatctatcagctctgtcctgcgttcctccggcattgttacccagtccagtttctcttcctctgcttttcttgcaaaatgttctaatgcctgatgtgcaatatttcccagatccatcgcctcaaatccgtaggtttcccggtcagaaagccgtaaaccataactcaggaaatgagcataggcacaggaagcaaacttttccagcctcgtcacactcacgcgttcaggatcaagatacagcttttcagccatctgacttcccagcataccggcttcttttttataaaatcctgctctcagcagcttttcaaccactgatctgcttttttcatcgcctgcaaaccatgtataaagttctttccattgtgcatccagtccctgttctttttctctcagcccttccgccagtctgagaatcccggtccttcttgtcatctcacactgctgccatgacttttcttcctcatccaccggttttaaatccgggaacaaccgcatcaactcctggatcagatacgatggccggagagattttccctctcctgacacttttgcccaggataaaaagagaaattttgtcggcttggtaagatttaaatacaaataaaatttctgaatataaatcttttcttttgcccccggagaaagtgagatttctttcttctgaaactgctcccggtcacattcagacaacaatccgcccactcctgtatttcccggtaaaagtgtatcatttgcccctacaaagaataaagctttgatattcttgatccttgtacgttctacatctccgatcataacctgatcaagacttggcggaatgactcctaccttcgcctcttccagtcctgcatccagtaattcacagtaatctttcagagcgatttcttcttcacccagcagacttacaaatttatcaaataattccataacgatcctgtatacctgtgcatactctttcgccagtgccagttctccccggtcctgaaattttttctccaactgtgcaattttctgttgcagcttttcctgaacaagatattcatatactgcctgcgttacatctctgacagtctttttcttctgcttcagaacctgtatcagtcccatcgtcttttctacaaagatcactctcagatgattcagttcttccagttctttttctccggttgacggagttcttctgacccacgcctgctgccattttttataccctttaatatccagtgccagacaataattttccaatcggtcaatctcttcgtccgtaaaaccgcacaatccggttctcaaatgcctgaatacactttcgtaggtaaaattctgttctgccatcgccagcaggctccgcagatattctacaaatgaattgagcaaaatactttttttatgatccataaaaaccggaatttcaaataattcacacgctttctccaatgcatccgcatacaggttcagatccgcagctataaccgcaatatcccgatatctgtagtctttttcacgcaccagctttcggattgattctgccacatacctggcttcttctctcggatttttcgtctcatgaagcgaaattgctccgctgcaggcctccgattcttcttttttctttttatactgtctccttgaataacggaaaagttccgattctaaaaatgccatctcaggattttctctgaaccggtatggcactttttcatacaggcagaccggttcttcaacctctgcccctgcatcctgtgcagtctttacaagagatgtaaccatctgcttgctcaacgcaaaaagctggtaaggatgccgataaataaaaggatcttccctgcggtcaatttcaaccgtaacaatcaccttttcactgacttttaaaagttctgagatcagccggatctgaaccggagtaaatcccgtaaatccatccagtgcgatcacgctccccttaagaagttctgagtcacataccgctctcgccagtacatccaacatctcttctttggtaatataacgatcccgcagatactcttcaaatccttcatatactttacggatatcctgcaatttataataaagataactttcctgactgagtccctccataaagtcatccagcttgtcaaaatcaacaccatactgtacaaattctgagataacagactttacttcactaatatatccctgctttttcaaatttcctttcaatactttcaggtcatcctcgagcttccccgcaatcctccggatcacaagattcttcccctcatcatcaagaaccggctgttcttccctgccgacttcttcaaatacgcgatatgccagtctcataaagcttaatgcatcaatattcatgatgccgcctctcggatgtgccgcacataaatctctctgcgtctgcatggtaaactgctccggtacaagaaccagataattcttttccgggtgttccattgattcattcacgatctgctgataaagataatgagattttccacttcctgaatttcccaaaataaactgtagtgacattcatttcctccaaatgctatggtatacagagcatctgccaccggcagtttcttctgcatactttggtataaaaagcagatacagaccggtcactcttcccacaccgttcctgcatctgcccgttgtccgcaatcactttgtatcgttcctgtatcgatgaacttctttactttataagacttaacaactcaccttttgatactgcaccgatctgtcggcctgcttcctcaccgttctcaaacgcaataaaggtcgggatactcattaccctgtatttctgtgcaatctccatagcctgatcgatattgatattgcacactttgatttccgattcctcctcagcaatctcatccacaatcggactcatcatcttacaaggtccacaccagtctgcataaaaatctaccagcactggcttttccgcctgaagaacttcctgctcaaaattttctaccgttaacttaacaactgacatctttctttcctcctataaacgaatcactaagttactttcctgcatttttctgcattttaacttttcttttttattaatctccagtttcacctgaaaataagcacttctttctaaaaatcaaataccatcggatcataacttgttcttttattttgattcattgcattcatccttttcatatcttcttccgtaatctcaaaatcggatatcgaaatattctgcaataaccgttctttatttttcgactttggaattgggataatcccctgctggacattccaacgcaacaataactgagcagacgtcttattatatcccgcagccatcctgccaatctcatcctcgtccagatttccccgcaataaaggtccccatgccatgacctgaatctcattttctctgcaaaatccgagtaatttctcatcatgtataaacggcgtatgctcaatctgatcgatcatcggtctgactttacaatttgccagcagatactccaactggcagacttcaaaattgcatacacctatgctcctgacctttccatcagtatacagcttttccattgctttccatgtatcaagcattctttcccggttctgtcccggccagtgtacaagaaacgaatccagataatccgtcttcaggcgttctaaagactctccaaagctttcaatcgtccgcccatacccctggttacaattatctaccttgctgatcaggaaaatatcctgcctgggaatccggttcttctctaacgcttcacccagtccgctttcatttttatacatctgagccgtatcaaataagcgataaccctgttcatatgcatatcttactgcatcgtccatttcttttcccgcattcatcttatagacaccaagacccatctctggaatttcaacaccattatttaatcgaaacataataagcctcccttccattttgcgatacgactacagtataacatactttttcttgcggttaaatcttttctgtatcttatcatatccgcattgcgttatcaatgcagatattattttataatatttttttcatattctctttgtaatttttataatttttttattttggccggcagttacctgctgataattttataaattcgtaatatttccagcactttttcatcacattttcgtcctaaaatgacatctgacatgaaggggagtctgtcaatcgaattgaagggagtataaattctatgacaaatgaacaatattatactttgatccatccttatgcagatgccatgaacctcatccttacccggctggagattttaaatcactgtgccgctgacaacgaggatgtccggccaatccatgggatcacccaccggatcaaagaaaaaataagtatggaaaataaattaaaaaagaaaaattctaatggaagtgtgcaggatgcacgcacattactgaaagatattgccggtatccgcgtcatctgcttttttgaacgcgatatctatcagctcgctgaatcattaaaaaagcagactgacctgatcctcgtctgcgaaaaagattatatccggcatccaaaaccgaacggttaccggagctatcatcttgtactgggagttcctgtttattcgctgaatggcatggaatactatccagtagaaattcagtttcgtactatttccatggatttctgggctgccatggaacaccggatctgctataaatcccagccctttgatgaactcgaaatgcgaaatgccttccgacagtatgcagaaatactcgatgggattgagaaatcctttgaagtgtatagtgagaattgtgggtgaaatttgtatttgttgaggagcatatatcccggcagtaagaagtttttttgacagaagagcgtccatatccgcacttgctgttgcatcgcagtgcaggacccgctttacctcagcccgttgacaacttgtaacagaaatgtggaaatgctcgtgcaaaggcactcgcatttacgtttcttaacaagttgggcaaagtgtcttcggaacgctccctgtcaatgcactgctcacgcaacagcaagtgcggatatttggcttttcaagtcagaaagcgttcctcgcatcgggacattttctcccaacaaacacgaaatttcagtaagaaataaagagccggaaggttaccaactaagatattatatcctgcgttttgcaggtcgtttatcctggtcgataaccttccggctcgttttttcactcttaaatttgcattgttgagtgaatacgctgcggagtcggaaaaaacttcttactgcgataagcagcggaaagcagggtgttcctgagcagatgcattagcaggagcgttccgaagacactttgcagcgtttgttagagaaagtaaatgggagtgcctctgcacgatcatttccactttcgagttacaaacggtcaacgggctgaggtaaagcgggctctgcactgcgaaggaatatcctgctttccacgtccgatccgcttttgaaaagttagctgattctttatagcgtatcaccccaacaactacaaattttatacttatttcatacaaactttaaaatcttttaattgatttttttcttacactatcttatactcatctcacatcaaaatctcagacagatccaattcccattttctacgtctgatgtccagtatggagagcatttcatatttcaagaccatttcggtcagagattttcattttgatgataacgattatatttttattaaggaggacttgcctatgggacaagcagatgtaaatgttaatctttggcttaaggatacgaaacggttcgcagacctgttcaatgccattttatttcagggaaaagccgtgatcctgccggagaatcttcaccccagcccggagacaaccgcagtcagtcttcaggacgctcaggggaaaaatattgtaaaaaagcaataccgcgatatcatcatgaactggcaggatcaggctgtgctgatgctgctggcggtggaatcacagactgccattcattacgctgcaccgttgaaagtaatgctctatgacagcatggaatatgcggaacaggtgcgggtcaaatggaaagaacatccaccccgtctttcttcggctgaatttctttcccgctttcaaaaaaatgataaactcatcccggtgattactttgatcttctattatgggacagaggaatgggatggacctttggaactgcatcagatgttcgatcttggtacagaaaagagccatgcggaactgatgaaaaagtatcttcccaattatcacattaacctcgtcgatgtcagaagactgaaaaatttagaatcttttcaaagtgatttacaaatcatcttcggtatgctacaatgtagtcaggataaatacgcattgcgtacatatttggcaaatcataaagactatttccaaaagctggatctggagacttatcatgcacttggagcattcttaaattcccggcagcttatggagataaacgtagagaaggaagaaaaggaggaactggatatgtgtaaagcactggaagatatttataatgatggcgttcaggatggtatggaacggggagaagcagcccataaaaaagatgtcgcctttcaaatgcaaaaacttggttattctttagatgcgattgcagcagtactgagagaacctgttgatggaattagcaggatactggctgtagttggataaattttatgtttgttgggggaaaatatcccaacaaacacgaaatttcaagaagaaatagaaaaccggatggctatcgaatatcttagtcaatagccatccgtctttttttatcttttaaattttgtattgttgagtggatacgctgtggagtcagaaaaacttcttactgcgactgccagcggaaagcagggtgttcctaagcaggtgcattagcaggagcgttccgaagacactttgcagcgtttgttagagaaagtaaatcgagtgcctttgcacgaagatttccactttcgagttacaaacggtcaacgggctgaggtaaagcgagcctgcactgcgaaggaatatctctgctttccgcgtccgattcgccacaaagaagctttctgatttacaagcatctcacctcaacaactacaaatttacgcctcatcaatcgcctttccgatatcatgccgcatatatttattctcaaacttcacccactctgttgctgcataggcatttgcacgggcttcttttaagtcttttccttttgcagttactccgaggacacggccaccatttgtcacgatctttccatcctcgttgaactttgttccagcatggaagcagtaatatccgtcatgctttttgaactcatccagtccttcaatcgggaatcccttttcatatttaaccggatagccgtccgatgccagtaccacacatactgctgcattatcttcaaactgaagatcgatctgatccaacgttccatcgatacaggcctcagctacctcaatgagatcatttttcatacgtggtaatacaacctgtgcctccggatcaccaaaacgggcattatattccagtactttcggaccatcttccgtaagcatcagtccaaagaagatgattcccttgaacgggcgtccctctgctgccatcgcatctacggttgcctggtaaatatatttgttgcagaagtcctccacttctttcgtatagaacggacttggcgaaaacgttcccataccgcctgtattcagtccggtatctccatcaccggctctcttatgatcctgggcactggtcatagtcttaatggtctttccgtcaacaaaggaaagaactgaaacttcacgtcccgtcataaattcttcaatgaccatctcatttcctgcagaaccaaatttcttatccagcatgatctcttttacaccggcttttgcctcttctaaatcctgacagatcagtacaccttttccaagtgcaagtccgtccgccttaagaacgatcgggaatttcgcattttccagataagcgattgcagcatccgggtctgtgaaattctcataagctgctgtcgggatatgatatttcttcatcagatcttttgaaaatgccttagatccctccaggatcgctgcatttttctttggtccgaatgtgcgaatccctgcctcttccagtgtgtcaaccagtcctccaactaatggatcatccattccgacaatacaaagatcaatctctttttcttttgcaaatgctgccagcttttcaaattccatcgcaccgatcgctacgcattctgcatactctgcaattcctgcgtttcccggtgcacagtaaattttctctgcctttggacttttcgcaacgcttgctgcaatcgcatgttctcttccgccgcttcctacgattaatattttcatggtcttctcctcctgaactcgccacgcaactgctgcgtgatcatcctgttatttaaagttgtaaaatatctgttgcaatctgttaaaatgaaaaacacgcctgctcttagcagacgcattttcctgtgcattgcttctgcacgtgatattctttaatcttcgatcacggttctgcgaccttctactttcaccctgccatttgcgatcaggtcgatcgcttttggaaggatcttccattcagcctgctccatcactctgtgctgaaggatctccggtgtatctccgttctctacttctactgctttctgtaaaatgatcggacctgtatctgtcccttcatctacaaaatgcacggtagcaccaactacttttacgccacgttccagtgctgcctcatgcactttcagtccgtaaaatcctgttccgcaaaaagccgggatcagggaaggatgaatattgatcatccggtttctgtattttgcgatcatttccggagggatcaccaccaggtagcctgccagtacgaccagatccggctgataggaatctacgcccccgatcaatgcctcattaaattctgctctggactcataatccttcggcgaaatacattctgccttgatcccatgttccgcagcccgcgtcagtgcatatgcatttttattattgctgataactccgacgatctctgtattcgtaatcctgcctgcatccaccgcatccaggatcgcctgcagatttgttccgccgccggaaaccatcactacaactcttagcataaggtcactcccttttcgccctcttcgatcttgcctactacatatggtgcatctccggctgcacggatcgcatccatggttttctctacatcttccggatcaacagcaagaatcattccgagtcccatgttgaacgtattatacatcatctgctcttcaatctctccgtctttcgcaagctttgcaaaaatcggtggtaccggatagctgtccttttccactactgcgtgcgtaccgtccttgagcatacgcggaatattctcgtagaatccgccgcctgtgatatggctgcatgcctttacagtaactcccgcatttttaatactcttcagtgcctttacatagattcttgtcggagcaagaagagcctcgcctaaagtagttccaagttcttcataatatgtatccagtgactctttcgtaatatcaaacacttttcttacaagagagaatccattactatgcacaccggaggatgccataccgatcaggacatctcccgctttcagattttctcccgtgatcatctcttttttgtcgcatacacctaccgcaaatccggcaagatcatactcatcttccggcatcagtcccggatgctctgccgtctctccaccgatcagtgctgcatccgactgcttacatccctctgccacacctttcacgatggatgcgatcttctcaggataattctttccgcatgcaatataatccaggaagaacagtggctcaccgcctgcacatgcaatatcgttcacgcacatggcaaccgcatcaataccgatcgtatcatgcttgtccatcaccattgcaagctttaccttggttccacaaccgtctgttcctgagagcagaaccggctcttccatctccttgatctttgcaagtgaaaatgcacctgaaaatccgccgagtcctcctagaacttccggtctcatcgtctcttttacatattttttcatcagttccactgatctgtatcctgcctcgatatcaacacctgatgtcttataatccataattttatctccttatttctctttcagatattcttcataacctacttctgcaagccggtctgccttcgcctgaaccgtctctttcatctcggcagagtacgcttttaatttctcaagaagttccggatcggacattgcaagcatctttgctgcaagaattgccgcattcattcctccgtcgatggcaactgttgcaaccgggattccaggtggcatctgaacgatagaataaagtgcatccatcccctcaagattttttcctgacatcgggattccgatgaccggcatcgggaacaacgccgcacacattcccggcagatgagctgccattcctgcacctgcgatgatcactttgattccttttccttcggctgcctttgcccagtcaaaaaatacatccggcatacggtgtgctgaaataatcgtcatctcataatcaatgccgaacttttccaacgttgccgctgccttgctcattactttcagatctgagtcgctgcccatgacaattcctacttttggcatttcatttcctccttcagtggtctgtatccttttctaatggttcattcagcacttccgtgccaggtaatacaaatcttccgtctcttaatagtataatgtctgtgccgtcttttgtcactacacttatttcttctaactcttcataaggtatggttatatctgtatgacagttgaagtatgctttggatacatcttcctttcgcagaagcgagcaggaattgtctttcgcaacgatttcctttccatttggattgtatacacggatttcctcactccaggaatagcacgtatctcccaccgcaaaatgaggtcctgtcttctctgcgatcaggatcggcatcttatcttcaatgccatattttcttgccaccacataggcagtcgtattcgttccgatggcgaactctcccagaggaagagtctcatgatttttcagtacattatcataaatatatttccggttctcggcttcgtctgagaagttgtcacacgtataatctgtgatttttccatccttgaacgtaagtttcagattgcggtactgtaaaccatctaaataaactttgctgacattcaggactccgtttgtcccgtccagtaccggtgatgtgaatacctcccctaccggaatgttgacatctgccacgcaattttcaaagatcgtctcttttgccgggtctttcagccggtacagttctacatgcatatcggtctgattctctccttttcctttgaccctgacatagactccctgatccagggcatcgatcatggtctgctgcacctgctcatacagtttcgcatccagtgtattaatgcggatcacttcgtcgaaaatctctgcatagtctgaaccaatctcaggaacgggatatgcgatgatcgtaaaactgcgttcatctcctttgatatattcattcgtcagttgcccggaacggctgtcataaagaagtgcaagacttctctgtgcctccgaataagccggggcagaggctttcgcttccggtgaaaacggcgtctctccaaaaatctccatgactgccggacctgcaaatcctgctgccagttcccggttctgttcgtagacggtcttcatcacttccagtttccgctcaatataccgcttatccataaataatgcctgatcctgccggtggtcatactcgtactgctggttcgcgatacagccataatacccgatcttatgatgctctctctttgtgatcacactggcagcggcacggtaaatcaccggctccagtcccatcttcttaaaattttcgattgccagacgaaccactttttcaaatccaaggctgtagcggatatttacgaccttcttttttgacagatcctttccggtattaataaatccgatccggtaaccttctgtatagacatctgccatcttctgtaaagtctcctgcggaagatttctcagatgatgtgctgttcccagttcatttttggaaatgtactcgccaaaacggtataaatattcatccgaatcaaggtccgccgtctcgatcagatctgccgcaaaagaaaaggacggatcgatctgctccagaatccggtctgcaagaaatacatcgcagtaatcactggcataccagtataagatctcccggatctgttctgcggatggaatctgcttctctgccccggctgctctgctttctttttcatccgctgtgctctgttccgatgcttcctccagtgcagcattctcaaaacagttatacacctcgataaataactcatacagaatggtcagatagtctgtcttctcctcaaacgcataagggatgccgccccgcaattctgcataaagtaaactgagcagttgtcccatttctgttccaaaactgctcactgcatattccggatttgcataactccgttcataatttttatccagaatgtcactgtaaagtatttcatttaagctacgcatctgctccagcgtgtagttttcccattctcctgaagctactttccgtcttgtattctccagctccagtaaaaataatgccacgtcctgaaaatatcccacgtatgccttctcgaccgtctcttccgtcaccatagaccggatccggttgaccgccagttcatgcctttcccggcactgttcatttctttctttctgaatttctgataaactcatctatccaagacctcctaccaagattgccataaataagatcagcgtgataacaccaacaccaagtccgatcttacaatttaaataccgtctgtctctttctaaaaatccctgtactgcacagtacattccatatatatcaatcacaaaggataccactgaaagtcctcccacaatccctgccgctttccccctggaaaggaatgcatataaaatacatcctgccagaatcaccagtgaacttccggtacaccagcaggaaatacttcctctccgcgacggcttcaggtaggactgtccatactttctcatcccgcgtttctttcgttctttttctctgcgacgttcttcttcactttttcctattccgaacatgtcttctccttatcagatctcctgtcatatagatgaggaatcccagtactccgccaacagtattgagcaggatatcatctacatcaaaacttccaacttttgtaagcaactgcatcacttctacccccaggctcagacccatactgtaaaataacgttctaaagaaactttttcttttccccgccattgtaagaaagtagccataaggcataaaaataagtatatttccaaacagattagaaaataccgcaaatgttcccaactgattgcggtaaagaataaaccgtttaatttccctgaacaaaaccagattataatgataatcttccatcacgccttctctgccataccagtccgataaaaaaaggaagtataccagaaaaaatatatataaaataaacagaacctttcccagcgtcctgactctctttgcttctttattcgtcaaaatcctgcaccttcataaaaagccccctccttttcccgggaggggactgcccttttaaaatgtaatctcgttcttattttttaacagacttgcaccattcacaatggaaatgactcccgcagccacacctgtcacaaggatgataattccaattacaatactgcctgcgccactgttcttcattgtacgatatgccttttccataaaatgtgcctccttattttactccatacttttcataatatgcgtcgatcgccgcttttaatgtatcatcaatgacaactttgccgttgcactctttattatacagacactctacgacctcttccattgtaacgatcgccgctgtatcaaatccgtaaagttcttttatttcatccaatgcacacttttcgccgcctttaccgacttccatacggttcagtgaaaccatcagtcctacgatcgttacatcagccgcaccttttacctttggaacagtttcttccatggacttaccggatgttgtaacatcttcgatcatgatgactctgtcgccgtcttttaatttgctgccaaggaaacttcccttatccgctccatgatctttttcctctttccggtctgaacagtaacggacttcttttccgtaaagttcactgtatgcgatcgcagtaacgattcccagcgggatacccttatatgccggtccgaataatacatcaaaatcatccccgtatgtatcatggatcgcctttgcataatattcacccagtctctttaactgagaacctgtcacatatgctcctgcattcatgaagaatggagattttcttccgcttttcagtgtgaaatctccgaatttcagaacatcactctctaccataaattcgataaattctttcttgtatgcttccatcgttcctgtcctcctattttacaattccaaccatatctcttacagtctcaaagccattctttttcatatatgcctcgattccgtcgatcaccttcaaagtcactgccggatcatggaagtttgccgttccgaccgacaccgcacttgctcctgcaagcagaaattctatcgcatcctccgcacaggaaatgccacccattccgatgatcggaatattgaccgcctgtgccacctgataaaccatacggactgcaatcggctttacgatcggacctgaaactcccccggttttatttgctacggcaaatgtcttccggttgatatcgatcttcataccggtcagtgtattgatcagggaaactgcatccgctcctcctgcctctgcagcctttgcgatctcagtaatatccgttacattcggcgtcagcttcatgatgatcggctgcttcgcaatctttttgatctgtccggtcagttcttctacatgctttgcatcctgcccaaaagcgagaaaacctgcattcacatttgggcaggaaatgttgatctccatcatatcgatcggctcatccgccagtcgttctaccacttccaggtactcttccggtgcatgaccacagacattcacaatgatctttgtatcaaacttcttcagatacgggatatcccttttgcagaacagatcaatccccggattctgcaatccgatggcattcatcattccaccgtaaacttctgccacacgcggtgtcggatttcccggccatggcacatttgccacacctttggtcgttacagctcccaggcggttcagatcaacaaattcagaaaactcttctcctgagccaaatgttcctgatgcaactgtcaccggattcttccactctactccggctatctttacactcatatccatcagatctccacctccgtcgccaggaataccggaccgtctttacagatccgcttattattcacattactgtgggcatccttttcttttgacctgcatacacacgcaagacaggcaccgattccacacgccattctttcttccagggaaatgtaacattcgattccctgctcttctgcatactgcttaatggcacgcagcatcggcgttggtccgcacgcataaatcatgtctgctttcagtccattctcgcggatcgcatccataacatttccctttgttccgacacttccgtcttccgtggaaatatacagttctccgtttgcctcaaactcctctttcaaaaaagtctgtgcatcccggtatcctgcaaggatctgcttcttttcacacttcatctgcttcgccagctccagaatcggtggtacaccgattcctcctcccatcaggaagactttctttccttctgctttttcgtacgggaatccattcccaagcggtccgatcaccgggatcgtatcccctgatttcagctttgaaaactgctccgttcctgtattttctcctgtcacacgataaaccacccgaagcattccccgcgtacggtcgatctcacaaatgctgatcgggcgtggcagtaacttgcttccatctgtcgtatacatggaaatgaactgccccggctttgccgtgtctgctgcctgcgtctgaatccacatgctgtagattccgtctgccagctgctcctgagatgctaccaccgcattctctttctgctttgccatactgtactccttttacctgaacttcacttattttgctgcaagtgccccgctgatatctgcaatcatcgcttctactgctgctctggatgcatcgccaaaattctctgctccgaattttgcataagcttcctgcttataagctgcgataattccacgggaagaatttacgatcgcacccagtccgtcttcattaaagaaatgaaccaggtcttttccttttccgccctgtgctccatatcccggtactaaaatataagacttcggcatgatctttctgagtacttttcccatctcaggataggttgctcctacaacagctccgatatagctgtactcatcacccatacactcagctccccactcggcaactttctctccaaccagctcatatagcggtcttccgtcgatcagtctgtcctgaaattctccgctggacggattggaagttttaacaagaatgaaaagtcctttcttttcttccttacatacatcaataaacggattcacaccatcggaccccagatatggattgactgttgcgaaatcttctccaaacggaacatactctttacttcctacttttatctttccaagatgtccggtcgcatatgctgcggaagttgacccgatatctcctctttttacatctccgataataaccagatcttttgacttgcagtaatccacagtcttcttaaatgcctccagtcccggaataccaaactgctcatacatcgcgatctgaggtttaacagcaggaatcagatcataagtcttgtctacaatttccttattaaactgccagacagcttcagccgccccttccagagtctctccgtattctgcatatgccttatctaaaatatgctgtgggatataactcagcatcgggtcaagtccgactacgatcggtgctccggttttcttgatcttttctaccagtttgttaatcattgttcattcctccatctttccttcagccagacgatccgccttttgagtatcgtcatttacattcaacctatataataccatactcccctgcattttcacaaccgacatcttagaatttcttttttcagatcacaggatttctttgctgaattttcttaaagcttttttaagggcaaaaaagtactctgaattgcttcaaagtactttttatctttctcattcaattttacataagaacttctgccagtcctcccggcactaacagcctgaacggataaaatggaagattcctgatcactccgaaaatcagaagaaaaactaaaatccctataagtattttaggattgatctttttatccacatgattctttcctgtcaatgcccagtctgctgcaaccgtcacaaaataaattccgagaaacggcagcagaaaaaccatgaccggattgtagcagaaagcagtcagaaaatttccatgcaggatattgtagctcgctctccctgctccacatcccggacagtacaatcccgtgatcacgtgaaaaaggcatggcagcggatattttaacggattgtggaaatacagatagcctgctccaatccctgccatacacccgatcactgccagaaataaaatccggtttttccggctttgtgcaaaccagtttcttaattttatcaccctttgcatttcggcctcttaataataattatcaattcctactattattccaaacataaagtataaaattcctacaaccagtccgactacaaaagatacaatcgtccatatttttgccatctttgcattctgagctgcttcttcataattaccggcattcattgcactgttgatcttcactgaaaatacaatacctacgataccgaacggaagacagcagcatactgtggaaataatggaaagtaccagatatggtacataattaatttccggtttctgcccgttattctgataaccggtcacgttctgataaccactgttgttctgataacctgctgcatcctgatagccgctgttgttctgataacctgctgcatcctgatagccgccgttgttctgataacctgatacatcctgataaccgctgttgttctgataacctgctgcatcctgatagccaccgttgttctgataacctgatacatcctggtaacccgctgcattttcagttgtctttgctgcccccgttgcctgtaccggatcattcttcactgcattttcctgttctgcattgggctgtacttcattctgcttcgcaccgcaatgtggacagaacttacttccatcaggaatttcctgatagcaattcttacaattcatatttgcacctctctcatttttctttcatcatatcactaaatcaacaaaatatatagttttttctattattttttcatctgtccatatcattaatacttacgtttctttttattccttttctccccgtctgaaagaacaacagctaccagccagtatccccagcataccaagactgattcctgccagccatcctgccggatattgaaatctgaaatatgtagcctgcttttccatataaattctgacaagccacaggatgcctgttccgacagtcagtacaagcacttccaccaggagaaaataccagtttccttcccagaaaaacatcttccttttttgcttttttgtcattccgatgctctccatcacatccagttcctgcttacttgaatatcttcccataatcattacattgaaataattggtcagtcctgcaaacagcagcatcattccgatactcccgaggatcatctgatttccatgaatccggtcggacattcttttcagcagatccgatctgcaaagaagcaggatcccattttctccctgatctgttcttctttgattttcttctgtcagaatggttctgatctctgattttacttcctgctcctgtcccgccttcacattcacttccatataaaaggtctctttttctattcccagtcgttcaaatcctttttcacttacaagaaagaacaacatattttctccatgccagcccagtttcagttctggaaaatcttttgctctcccatccaaatatccatttaaagtaaagacttctgcagactctttatcatactccgatccaggactgcaaaaacttaccggttctccctttacttctgctgtcatttttttctgttccggtgtgaagccatattcctgataaatcagtactccgctgccatcttctactgaagccatatccactgacagatttttttcttctgcatactctttcaggctgtccatctctttttcactcaaaatatgcactgtctccgggaaaccggaacgttccatttctgtatctgatttttctacattggtctcctcttctccttcatctgatttctctgcatcggttccctcttctccttcatctgagctttctgcactcactctgaaatattcatcagaaaaaggactccaccctgtttccgaaatcactgcgttcatataagctccctctgtacactctgatctgtcccgatccacacctttcagagccaggatcttttttctcactgattcagaaatgggtgcaaaatccggagcaaagtcatccgttttattattccacagcaaatctgctgtatttgcatccgtcaccaatgggtccagtgcctcttcatccggttcactcctgattccttcttttgcctcctcgcaaaaatcccccgcaaggataaaatccggtttctgcatatagatattcgttgcatcacttccacccgtaaccacaactgtacaaagcagtgtttccactcctaaaaacaatgacagcaccgtcagcacaaatcctgccctttgtcttgtcacatttctccatgccagcaatggaagctctgctgatatctttcgtctgttcctttcgttttgcctttctgtacttcgtctttttcgactgcggttctgctttcctgtataatgcatgctttctatacaggaaagccggatcatccgattcatatttttttgaatggcagcttcaatgatcagcagggtaaaaccaactgctgcgatcaggatttcaggtcgaaatacggaaaattcttttgtgccaccatattcccgcagatattcctgccccagcagaccgggaataccaaagaataaaagaagcactgaaaacgccactccgagtccacttcccacaagcatacagcctgccatctgcctgtggcagattttccgcaactgctttttcgttgttccgatcgtataaagcaatccaaactgacggatatccccgatcatggaaatctcgagaatattatggataagaaaccagactccgcccagaatcaaaatcactccgagaactgccatttcataacttccggtcagttgatctaccgctgtcagaaatgcaggatctgtcacggtaattctttgtcctgtatccgtccgttttacatctttatataattgttcttctgcctcttcacggctcatccggtctgatggacagatcagtatctccgaatttttctccgatatgattccccactctgccgcctttttttcagaaatatatccctgctgagctttagaacccgaatctgtatatgaggtataccacccgctcaggtaaaatagttcttcttttttctcctgccatccggtcactaccgtcagttggattttcattcctgccgtcggctcagtgattcccagatcctccagcatttttacagagaccatgatctcctgcttttcttttgggtaatgcccctgaagatctgtataagcaggacggatgattttttcccatgcagattgatctaacagactgatctcaccgagcttcttttccccgctctctgctcttccggctctcactcttttccctgcattctttatataactcagggagcagatctgccggtactggtcttctgtcgcattttccagtactgctgatgctgttgaacctgcccggcgtaccgctttcgtatactctgcctggatctttccggcagaagttccgaaaatcagtgtcagtgtaacaattccgaccgccaccgcacagagcagtaccatattacgcccatggttctttttccttaatttctctgccagcatggacagaatctcctgattattgttcggaatcattctgcgatcctcccgtcctcgatccttatgatccgatccgccatctgtgcgacttcttcctgatgtgtcacaaggatcacagtctgatgatatttctttgcacaatttttcaaaagtcccacaacttccatactggtcacagaatccagattgcccgtcggttcatctccgaggacaatcgccggctttgtcattaaggctcttgctatcgctgctctctgctgctgaccgcctgacagcgtttccggcagttgcccgagtttttccttcagtcccagtgttcccgtcagttcttcaaaaaactcctgatcgatctctgcaccgtcaaggcggaggggcagcacgatattttcatagacgctgatcatcgggatcagattatattgttgaaaaataaacccgatattccttcgtctgaaaatggtccgttcctcgctttccatatctttcagactgcttcctctgatccatactccgccctcgtccggcacatccaggcctcccagaagattgagaagtgaagtttttccactccctgatgttccgacaacagccacaaactctccttcttctatctccagtgtaacaccatccactgcatgtacttcgtaattctctgtaacaaaatattttttcagattcaccgcttttacgattttcattgtccttcctctcctctgatctgttctttttctcctgccattattttaaagaacaaatctaacaaatttctaacaatgcaaaatcttttattgccgtggcaaagacagtttcatttctactcccggttcacaccgctttaccgttaaaagtccttcatgtaaaaataggatttttcttgcaagatacagacctattccaaagccttcctcatccgtcacccgctttccgcggtaaaatctctgaaagatcagattcttttcctccggttcgattccgattccgtaatctctgatactgaaagttgtgaacatttcattttcctgcaggctaatctttatttttccattttgcggactgtatttcaccgcattatccaacagattaaaaatcgcttctcccagccagtttgtatcatgcatcacatgcattttctcaggaagttcaaactcgaaccggatctcttttttctctgcctgatccaaaatctgaccaagtgcattccgcagagtcttaagaagatcccgctcttcttttctgatctgaatcagaccatgctctaatcttgaaatacggataaaatgctctgtcagaaaataaattttttcttcactgctctgaatggctttcagataagacagttccggttctgtccctttcttttcgatttcttctgataaaaagtcaagataatttttcagatttgtcaatggtgtccgcatctgatgtgcgatttccgaaatcagttcctgaagttcttttcgttctttctgtgcatcttgtttctgactgactaaaatttcctgcagccgcagcagttgatgccggattttggaatccattgtctcttcgcagtcagaaaaatcggggagttcttttccgctggtcattcgctgcacagtatttgatatcttctttaattcccggcttcgttcttttctctgaacccggtacattccggccgccccggcaagaatccccaaaagaaacgtcccagcactccaccacaaaatttctatcagatccattactcttcctccatccggtatcccagtccaaatacgttctgaatatacggccgttctcccacagcttcaatctttttccgcagacggccgaccagcacgctgacactgttatcaactacatattgaccatcaattccccatacatgctccaaaatattttctttggtcagaacctgcccctgatttttcatcagatattccaggagctgatactcttttgccgtaagagagatctcattctcccctgacactgccttttttcgctgtggatacagagtgagatttctgcatttcagaatctgttcaccggcatcttctccccggtttcgtctgaaagctacttcaatcctttttaataacactttcatggaaaatggtttcacaacataatcttctgctcccaggtcaaatgctttcagcatttcctgctcttcatcccttgccgtcagaaaaattgcggggatctttctgttccattttttcatcagggtgtgatacagttccataccatttccgtccgggagaccgatatcaaccagtaaaagctcctctgttccctgcagaatctgccctgcatctttctttgtataaacctgcaaagtccgataaccttccttctcaagcacgactttcaaagacctgcttaacaggcggtcatcttcaataatcccgattgtcattttttatcccgtccattctttcctgctttccccagtcggactttttccatctcctctgcagtctcttcatccagataatcaaaaagataatttccgacactgcctttctttccaagaggctcacctctgacttctgccagcgtcctctcaatttcctctttcagtcccggagcagacatccggttcgcaccctgtcctaagatgatcacctgctccagtccgtctgaagttgccacagttacagcagcatcctttgcgatccgtcttacagtcttttcgatatactggtctgccgtttccgcctctttggtatagacaatataaatattatgatatttcatcacttcacccggattgccttcaactttatatgcatcatacacaaggatcagcgtacattttctgtatccctgatagttgcttaagatatccgcaagtttcccgcgtgccgcaccaatatccttttcggacagctctcttagttcctcccatgagaaaatgatattgtatccatccaccagaagatattcctgtcggccttccttttcccgtctgcgtctttcccatttcggatctgtataggcactgcccggttctctgtccttttcctttgcacagactgtcaccggaccatgattctgcttcaccggatcaggagttcttacataaattgcatccagttcctcctgtgtcagttcaatactggaatgccgccgcttcggaagtgtgacttccgcaagtccttcttctcccgtctgatccagtgtgcgttccatgtgcatatattcttcgacttcatcccagtccacgacaaatcctgcaccatgggcacaaaagaccgaaccggtaggattcgcaagatccagctctgaatcataccctctcgccgctacaacttcttcctgattatggcagagatcataccccttcagggtcagagaaattcttcctcttccacctgtatatgcaatgacatctttctgataaccgcttaaagtcgataccggtgcaattcccgtcagcacagtcatttctcccaacgtttccggtgcctcaaattttccgaaacggttctgtatatccgtcatggcacgtcccacattttcagaaggtaattcgatcctgaactcataatacggttcaagcagtacgctttctgcttttttcagtccctgccgcacagcccggtaagttgcctgtcggaaatccccgccctccgtatgcttcagatgggcttttcctgaagtcagtgtgatcttcatatctgtaataaccgatcccgtcagaactcctttatgttccttttcctccagatgggtcagcaccagccgctgccagttccgatccaacacatcctcactgcattctgaatcaaactgtattcctgatccgcgttctcccggttctaaccgcagatgtacctctgcataatggcgtaacggttcaaaatgcccgacaccttccaccggtgctgcgatcgtctctttatagacaatgctgccttccccgaactcaaccagtactccaaagcgttcttttatgattctctgaaggatttcaatctgcacatcgcccatcagttgcacatggatctcctgactcttttcgatccatacgacatgcagttccggctcttcttcctccaaaagcttcaaatctcttaacatcgtatgaacattacagtcatccggcaaaatgatcctgtacgtcagcactggctcaaggatcggcagctcagaatctttttctgctccaagtccctgccccggatatgtttccgccaaaccggtcactgcacagacttttcccgcatctgcctccgaaagaagctcatacttttcaccggaatatacacggatctgatttaccttatcaccattttcaccgatcacatccttcaccttcagcgtgccaccggtcactttcaggtaagtcagcctgtttccctgaccgtctctcgcaatcttataaaccttcgctccgaatactgccggatattctttctgcatctgatatgtgcagatcccgttcatcagttcttccacaccctgcaaatgtaacgccgaaccaaaatagcatggaaaaatctttctttctgcgaccagccggcggatcgaggcagcggcgacactgcctttctcaagatattcttccatcgtctgttcatcacacactgcaatctcttcgatcacttcttctgctccggtttccactctgccgaaatcaatacatccttctgaaaaccgggatttcagttctgcaagaagttttccacagtccgtcccttcctgatccattttattcacaaaaaggaacaccggtattccgtatcttgttaaaagtttccacaaagtctccgtatgtccctgcacaccgtctgccccgctgatcaccagcaccgcacagtccagcacctgcagtacccgctccatctccgctgaaaaatcaacgtgtcccggtgtatccagcaatgtgatctccgtatctttccaggtaagcaccgcctgcttggaaaagatcgtaattccacgttcccgttccatttcatctgtatccagaaaagcatcctgatgatcgaccctgcctaaatttcgtattgcaccactttgataaagaatactttccgaaagggtcgtctttcctgcatctacatgagccagcaggccaacattgagtactctttttcctgtttttctttcctgtccgctcataaatcttctctttctccttctccttaattattcacctgatgatgcacaaccaggctttctctgtcgattgctttaaaagaatagccaagatttttataatactccagaacggtcggcaatgcctcgatcgttgtctcttttgttgctgcatcatgaaacagcagcattacctgatgatacttgtctgtctccgactgtgcaatgatttcctctgtcgtagctgttcctccatccccgctgctgacattccagtcataatactgatatcccagctcaagtactttcggcacaagtacactcatgattccctccatataattccttgaaaccgtattggacgagccacccggaaaacggataaaacacgggacgaatccgatctgctcctttgcgatctctcccacttcttccagatctttcaggtacgcttcttctgaagaatatacggtctcataatcatgacagaaactgtgcagaccgatcgtatgccctgcatcatatgctttttttatcatcggacggtactccggtttctgccccgtaataaaaaaagttgctttggcatcatactgatccagtatatccagcactttctgcgtattctccgaagggccgtcatcaaatgtcagatatacaatcttttcatcactcgcttccgttgtccccactgcaacacccggctgcaccgaaagctctttcttccgctgctcctctgcttctttttctttcttcttttcttctttttctgcctttttcttttctgcctctgcctcttttacagcctcagcttttctggcctcctgtcttgcttctttcgcattcaatcccatgcagaaaattgtaccgcaaagtgcaaaaaatacaagtccacataaaatccttccataccggttctgacgacttcttctgtgttcttccatctattatctgctcctcattcgtaatagggttttcccggatcatgaatcaatccatatagaaaaaacatcagccggggaaaactcctgactgatgcttcttacccgactgatgcctattataagatacaaattttaaaaaagatgaacgctttcattaagaattgttacatttctttcctgcactttacagaaatgttccggtgcctccgccataattacctccgccgcagcagaggccgcttccgccacagcaaagattgcacatcagatttgccacgcataacttcacgcaatagctgttatcaaatgtacccggaaatccatacatcgtctgtcgtgtctgataccagcttccaccgccttccagccgctgcagcagcatctgatactgcatattctgaggatcaagccggacagcctccctggcatgctccagtgccgtcacgttattgcccagtcccgaatttgcagaagcactcagaaaataccataaggcactgtggtttgcaattccgtcaaggacattcagtgcttccctgaaatgtccgcttctgatataattggctgccgcctgcagatgtgcatcttcctcgctcatacctgctgttcttccggaagtcccgtttccgtagccaccgaaattcccgtaacctccaaaaccgccaaacggaccataatcaccgtatccgctgccctgtgaaccgcctcctgctcctgacgaagagtagcctttttcccgctcatccatgatctgctgatatgcctgctggacttccttgaacttagcctctgcctcatctttatgaggattgttgatattcgcatccggatgatactgacggctcagttttctgtatgccttcttaatctcctcatccgatgcactctggtctactcctaaaatctgatatggatctgacatctttttcttaatttcctctcattctctttttccactgtccgctttcccacattctgcctgcactttctcagctcttttaatgaactttgtgccatataacaacagaaggtagtgacaagtaataacaaatacttactcagctctttttcatgaactttgtgccacacttcggacaacggatctcgatctttcctttgcctcttggaatcctgatcttctgactgcatcccgggcatttgtaaatatgatactgctttctctgccggaacagatctttctgctttgcaaaaaagcaacggatcttgtacgactttgcaagatatgcctgattctccgcataacgctttgatacattctttgagaacatcctgaaataacagtaaatgatcaggaaccatccgacatagtaaaaaattgtcccaataagacttcccctgaaaaacgaagccagcaatacactgatcagaccgatcaccagcaatgctttcgacaactgatccacaccgtatcttccctgcataaaccgcataaacttttctttcatgatctgcacttcctgtcttaaattaatatggactttattctgatccgtttttcaatcaaagtcaattaaataaatctaaaattattcctgattcagaacatttttgcatacttcgtctgaaatctgatagacgatcttcgatccatccagcatcacataacggtttccgtttccatcttcactgccgatatacattttcatcgtcttttcatcctcattctttgtataagtagcctcaaccgtgatccgactggcttcatccagtccatagcctgccaggtctgcatcttccacagaataatcagcaaccgttgtcagtgacaccgcacccagtccgcctgcaaccgcagcgatctcttcttcctgatcttcattttctgaatcataggtcgtagtcgttccattttccgtgattacttcttttttcagattgccgcttccgatgctcggatattcatccagttgtgcaaaatcagacaactccgtcttgaaatcatccagcacgctggatgcgaccgtatagactgtaccagtatcgcccaccgttacataataatctgttccggtagaatctccaaagctgaccgttgttactgttccgtcttcttccgtgatctcaatggaataattcgggtcatccagtccatatgcgtccaggctgtctccgtcttccagtttccggtccgcggtgatctgggcagccgcctttacgatcgcctccggctcactctgcttcaacgggaaatccttatcttctgaataataccaggtatctccttctttttcaaaagacatttcacctgctgccacctgatacttgatcgcagtgatcgttgactcatccagatccgtcactttgaccgtttctttttcctcttttttatcctgctttttattccaggagcttagtccaaaataaacaatcagaaggatgaccagcactcctgttaaaatcaatggtccttttttctttttcatactgacacctcaggcctttcttcttctgaaccatacgacaaaaccaccgatcagaaccactgccggaataccaaatacaacgagaatgctgaatccacctgcatgctgaacagtattgtactctgttgtaaggctctttgcctcaatagaaagattggtcacaccgtcaaagtttgctgtcactgcattcataaatacctgcgtattttcaagctgtgaaaatgcatccgtgatctgctgatcgatcaggctgcctgcagagataaccgtcagtctgctctctttgctgtcagcacttccgtctgatgaaatgtctgttgatgtatccgctgatgtatcatcggatgaagtactgtcggatgacgcatccgtagaagaatcgctttctgatgaggcagcatcggatgaatcgctgtcggaactgatcgtttcagttgcaaccactcccaggtcatacgttccctgcttctgatcttcttctgtcactgcatatgcctgctcagaagttgtcataaaggcactcgttgtgatcgtatctcttgccggatccgttgtcgtcagtccgcgggaattcatcagaagtaccatctgagaactgattccgtctgccatatcaccggataaattcagtaccgggaaaatataatacggctgattctgataacatctctgtggatctgcgatataaccatctgccccctcaattccataatctttcaaaagtcctgcaagtttcggtaaagaatcaagtcctgtatctcccaacagacacatcaccttgccgccttctccaagatatccgctcagaaggctgacctcatcatcagaaagatcattcgtcgggccatccatcaacagaagatcacagtcatccggtatagaatctttcatcagaagattcagttcctcggttgtataattattctttgtcatcagatccgtgatcgttgtagaaagagatccctctccatgtcctgttacagtataaatctttttctgaacatcgctggtcacataatttactgcactgctgagctgtccctcaccgtcaaaggaggtataactcgatgaacctgagtaataagaagaataatctgataccaggatcttgtcaaaggaaacggtcgttgattttcctgttgcctcgcaggatacatagatcgtattctgtgaagtattatattctgtcagtgctgacggatgcagaaccgggtcgatccattccaccttgatcttatctgacagtgccgcatatttgctgataaatgtcgtgatcctgtcatctgtctcatctttgactgccagtactttcatatcaatcttatcatccagacctttcagcagatctttcgatgtatcggaaatgtcataaatctttgtactgctgacatcaatatttctgtatgcttccggaatctgaccgacaaccagattaaatacaatcatgactgctacgaccagcaccgtcattcctacactgtaggaaccatgctttgttccggaagtatggaacattctttttaaatttccttttttactttttaatttttccacgatccaaacctcctaactccaacgtcttttctgaatcgactgtactgtaagaaatacaaagactgcgatcagtgacagatacagtgcaattcccgtcacatctacaatactgttggatgtgatatctgtaaatacatccgacagtgccagtctcccaaacattttggagagaagattctcaaataaagaagattttacaaaataagtaataactgccgcagcagctccgatcacttccagtcctcctgcaagcatcaggttcgatgtcatatggaaaatatagaaagcaacgatcgtaagaatgaccaggactcccaccagtccactgacagccgaactcggaagcagtgtcaggattccgttccataaatacaagaccaaaaggatgccgaatgtactgataaatgcaataatctgactttctgtcaacgaagacagaaacattccgatcgctgcaaatacgcatccaagcaggaaaaataccagaatagaaatatagtccactccaaggtatgctgttccctgagatttgataatcagcggataaatacagaagatcacactcgggattccaatcactgtgatcattgcaagatactttccaagaactaccttccacaaactcaccggtgcggtcagcagaagctgatccgtcttattttttcgttcttctgaaaagcttcgcatcgtgatcagcggaatcccgacaataaatacgatcagagagcctgccagcgaataggaaaaatacggatatcccgcagacagattatatgcaacaaaataaatgcccgtaaataccagaaggaatgccacaaatacacatcccaccatagactggaaataggacttcaattctcttttataaatcgccagcattgcttacttcctccttttctgcctcttttgcctttctggcaaattcttctgcggccttgtcactctgggtcagctccataaatacatcctccaggctgacctgaaccggattcagcttcagcagcggcatcttcttttctgcaaatgtcgtaaagagttcttcccggatatcctgtcctctcttctcccggatctgtccgcttgttatgccactggcatctgtcttcaacgaaactttttcgattccaggtacatttttcagcacttcttttactttggaagcttctgtcctggtctcaatctcgatcagcccggactcacccaggtaacgttccaggttctccggtgtatcacttgcaaccagttttcctttggaaatgatcatgatatagtcacacacttctcttacttctgcaagaatatgagaacttaagataactgtatgcttcttcgccagcttacggatcagttcacggatctcaatgatctgcttcgggtcaagacctacacttggctcatccagaataatgatctccgggaatcccagcacagcctgtgccagtccgactctctgccggtatcctttggacagattcttgatcagacgcttttccacgtctttgatctttacaagcttttccacatcatcaatcgactctgctctttttgccttcggaattttcttcagttctgcggcaaattccatatattccctgaccgtcatatccatatacagcggtggaagctccggcagatatccgatctgctttttcgcctcctcaggctcttttaaaatatcatgcccgttgatcagcacctccccttctgtagctccgagatatcccgtcatgatattcatggtcgtagactttccggctccgttaggacctaaaaagccgtagatatgcccttcttcaatggtaaaattcaggtgatctacagctaaatgatttccgtactttttcaccagattctttacttctatcaaagtctccatcctcctatttctctctgcataacacagagtttctttttacctgtcaacgttatcagaagtttgtgaatcttttgtgtatcaaatgtgacggaagtttgctctgttcatttttgtatcaaacgtaacgaaagtctgctctatttcaattctacaactgcgtagggtcttccatcctccgcacacagttcaataaccgtccggtcttcctccctgctccttttcggataaatgacatctcccaggactgccgatttcttatactccacacggatctgtctgaactggcggtcagccggaagaaattccagtgccatctgcacatactggcagttatttacatgctcattcgtatcaatatgataacgacgtaccgggaatgcctccagtgcctcagtctctttcgatagggagatttttcttcccttataaggcatatccagtgcctcacccatgccgtatggctttatgtctttttcctccggtcttaccggccgcccggtctctgtatcaagaaatacccatacagaataagcctttgcgatcatgttcccgctttcatcttttaggtaaaaattacgatttccgaataatcccttaaattctgtcggaaatgttccgatcgtgatcctttctcccaacgcaggataccgttctgcgatcacctgccagtaggacagaatccaggcacgcttttctgccttcagtacctccgttccaagtcccacatcttctgactggaacgtgctgcaatcctgaaaataattgatcagtgcaggaagggtcagtgttccatgatgatcgatctcactgtaacgtactctgctgttaaattcatacattttatttatcctccgtttttgctacataatcataatctaccgtaatcacactctcgtatctggaatccactccctttaaccgctccatcaactgtaacggaaggtcattgcgtcttttttcatcatattcgatcgggatcaccatatcgaaaatcagattgatcctctccgctccccacacgacacgaaaatcgtggatgctgcatgccggatccagctctttcagaagatgctctgtcttcttcctgatacggatcaccttttcatctttcatttccaccggatccatatggatcaccagcatcatcccaagttcttttgccgcatcccgttcgacacggtctatgatctcatgcgacttttcaaactcctggtcgttgggaacttctgcgtggatggatgccatacttctgcccggtccgtaattatgcacgatcagatcatgaactccctcgatcccatcgtagctctctacaaattttttaatcttctcataaacctccggactgaccggttcaccaatcagagtattcaatgtatcttttgcaatcccgaaaccggcccacatcacaaccagtgccacgccaagaccgacaaaaccatccatattgatccctgttgccgcaaaaaagagaatcgaaaaaattgtcgctgaagtcgtgatcacgtctcccatagaatcagtaaagaccgccttcatcacctgagaatcaatcttctctcctagctttttgttgaacagtcccagccacagtttcactgcgatcgaaaggcataaaatcaacaccgagaccggaagaaatttcaactgctccggatgaaggatctttcccaccgaatccttcagaaaggtaaatccaacctccagcaccagaaaagaaacaatcagtgctgctatgtactcgatccgcccatgcccgaacggatgatctttgtccgccggctttcctgccatacggactcccacaaaactgatcaccgatgagcctgcatcggacaggttattaaaagcatctgccgtaacagatacactgttcagtaccagtccgacaatcaattttgtcagaaataatattacattacaaaagatgcccacaatgccggacagcataccatatgccgtccgcacggacaccttttctacctcctcataatcttttacaaaatgcctgataagaaattctgtcatatttatttttccttccagaagaaccagcggatctgaaactttgaacctgccgtcacttccgaatattcttcctccgtcaataccttctttaactgttgttttcccttttcaggaagtactgcatttgttgtatccagaaaacacagattcggatacagtacgcaccaccagttatgtcctgccgcttctcccagttcgatcctcagggtcttgtaatttccggcaggaaatgtgacatctccataggtccgatccgggaaatagcatgtcgtcaccgccacactgactgtctgctgcatctgcaggtctgtcattttctgctgagccacccgccggatctcctccgtatgctcccgcatccaccgggtcgtctcctttacatccatcccttcaggaagtacttcttttaaataggataacactgcatcccgcacctccaacttcactgcctggtctttcctgctgtcgctgttcgcaagaacatggaaccgcaacacttcctctgccagatgctcctgtactgcccggtcttttctctgcacatctcccagcactactgctgttgtcactacggttgccacgatcagtgcaaggaaaatgctgatcacacgaatcttccccggtacgatctgctcttttctgactgcttctctgactacttctttcatatgtaatccctccatatatctattgtccggtcaggtttttcctgatctttctcatctttttccggtcatccgatcggctgatatatggagtattacctgaaagctgccctctattcatttttcggatacattttcctgctgatgcacttttcttcctgatacatttttcttacatacgcttttttctatacgcttttttctatacgcttttttctatacgctttcttctttttcgcggatcgtgtctactactgcctctgcctggttcttgatatgctgtcctgtgatctgggttgcacgatctttatcccggctttcgatcgaatcaatgatcgtctgatgttcttccagcaactgcggataacactctttctttttcagatattcaatcctgtagcgatacatctgctcccgcaaattgttcagaagctggatcagacggcggttatccgtagctgcataaatgatatcatgaaatgccacatccgcctgtgcgatccgggtaatatcatcgctgtccagcgtattacaaaattctgcggaagcctccttcatcgctttgatcccttcttcatccatacggtcgcaggcaagctggactgccagttcctccaacgcacaccgcacttccagtacatctcttaaattcttttccgtgatttctgcaacttctgcacctttccttgggatcatcaggacaagaccttccagctcaagcttacggatcgcctcacggatcggtgtccggctcactccgagtttgttcgcaagctggatctccatcagtctttctcccggcttcagttcccctcttaagattgcctgccgcagcgtattaaataccacatctctcagaggcaggtactcatccatcgttacttcaaaatctattcccatattattttctccttacgttatgcacattcgtcacatagacctgcttcgtcagtccgctctcacgaatcttcctctgtgcctcccttgccgcagcacggttttcaaaaagtccgaaaacagtaggaccactgccactcatcatcgcaccaatcgcaccattctctctcatgacctgcttcaattcttcgatcaccggatgcatcgggatcgtaacatcctccagcacgttccccatattttctgaaatcctgtgaagatccttctgcctcagaccctcgatcagagcatctatatcaggatgttctatgatcttctctgagtccagtgcctcataaactactttggttgatacactgaccggtggctttgcgatcaggaccgtacatttcggcatggcagggaggacacttaattcctctccgatcccttctgccagcaccgtccctctcataatacagtaaggcacatctgctcccagctttaccccacgttccatcagatctttttgctgcaggtggagtccgaacatgcggttcatcccgaataagacagccgctgcatctgaactgccgcctgccagtcccgctgccaccggaatatgcttattcaacacgatcttcacaccctcgctgatcccaaattcctcgatcaggagctttgctgctttataagcaatattggtatctcctgtcgggagaaatcccaggttggtcgtaagttcgatcccaggttctttcttctttgtcagctttacttcatcatacagataaatggtctgcatgaccatacgcacatcatgatatccgttctctcttcttcccagtacatccagtcccaggtttatttttgcaagtgctttcagctcaatctgattcatccgtatcttccatcctctcaatcgcaaaacgcatgctgtatcttgtatacattgtacttacagtatactcatattttctttaaaaatcaataatttatccccctctttcacattttcattctgcattccgtttacttccataatgccctcttttgtcgtcatatactgctttgcaagctgccacagatcttctcctctctgcacgatatgccccacgatcgacggtcttttttcaagctgttccaggtccagcggttcttccctgacattctccatcgtccacactttcaccggtcttcttaaaaatgtatcaaatgtgaggattcctttgatctccactgattcacttccgaccagtgtaatctgcaactgctcgatatgctgttccatattgtagactgtttcctccggcatttctttacactcgatctgatgttcaaatgggatcattccctgccagcttccatatggttctgcatcatctccacgcaaataaaggaacgagaggtgtaaaattccttccacccggattccctctccggtcctatctgcatgctccacctggattgctcctctggcatgcaggatctgcagaacatctgtcttcagctccggcagtgacagtcgttccgtcaccttacattttgactgattctgcattaataattcttcacataccacctcagtcgtatcaaaaagacactgtttctgaagtgaatacagatcttccagcagttccacgctttcctcccggtaaaaattcatatggagtgccagcgttccttcaattccaagaatccgcatttccccgtcttcatccattctgagatcggtcagtgtatcctccatcgtatggcgaatagaaaaatacatctcttcactgattccctcacacggaatccttccctcataagggatcgtctgcgagatccagtccggcttttcatccccggacagatacatacagaacaggaacagttctccccgcacgatcaattcatcctgtcctggacgcagttccagtttccgctcactgatatcggtaaataagatctgccctatactttctttcgttcccggaatcgtaatttcttctttgattctgtatgtatcttttttggtcacttccagttgcagtagctgcacttttttcatttttttatacagcggaacatccccttctgcatccgtcacggtctcttcatctaccagcttttccctgccgacttccagttccaccatcgcacgcagactcagttttcttgaatggatcagggacggagtaaactcgatccgcacattctgaacataaaattcttccccctcctgattttctgcataaaccatctcctcaaacggaagttttccttccagcaccccaggtttcggatctgaagaaacattcagataaagaatcctgaaatacagctttcctgtaatccggacataattttctaccggacggatctcttcgatcttcagctctgttcctgtatcaacaattcttctgacatcctcttttgcctccggtacattatactcttcatccacataaaactggtcaaagatcttctttccttctctgacgtaatgaatcctcttttttatcagttccatttttctcctccttattcaaaccggatatttttttctgtctcttctagttccactactacataaggataagttgcaatctcctttttttcttctcctttttccggtccgagaagaccggtatggatatagaccgtttcctgtgtttcacagagccggtccacttccacactgtatcctgttgtcttctgctctccatatccctcggcaagatacaatttcccctgatccgcaaaagtcagccggaacggggttttcttatttttctcgatcaggctcattaattcttccggaatcgcctcctccgtaactacttttatctccagttcgtgctgttcagaattctttttttcctgccgcacgcagcctccggcctccaaagacagcagcagacagaaagccagtgcaaaagttttccacatactctgcttttttctctccacttttccacctgttgcggcacattttccctattatcctatgacattccccatacagatattcctttccggcctgtcctccccagccttgtattttacgggatgctcctgtataatggaaagatatcagggcgtctggtttccgcactgcaggagcctgctcacgagtgagttcaaaggcttttaccacgctccgatagcataaaataaaagagaggaatttctatgattcgattaatatgtattgttgtatttctgattttatacctgatcctgtcgattccggtttttctcgtggaatggctgatcggtaagttcaatccacaggcacgggatatcagttccttaaggatcgtccagtggggatttaaagtgatcctgaaaatgaccggagtaaaggtcactgtgatcggtgaagaaaatattcctgatgaaccggttctttacgtgggaaaccatcgcagcttctttgatatcctgcttacctacagccgctgcaaaagactgaccggatatattgccaagaaagagatggaaaaagttcccctgctttcgatctggatgcgttttgtctattgtcttttccttgaccgggagaatccaaaagagggacttaagacgatcctgaaagccatcgaatatatcaaaaaggggatttcgatctgtatcttccctgagggtacaagaaataagggagaagaactttctcttcttccttttaaagatggagcatttaaagtcgcaaccaaaaccggttgtgctattgtaccgatctccatgaataatacctgtgagatttttgaagctcattttccaaagatcagaaagacccacgttgtccttgaatatggaaagccgatctacccggatgagctggataaggatacgaaaaagcatatcagtgaatatgtaagaaatatcattgatgagacgatccataaaaatgctgaacttatatagtttagcattttcagagaactgaagaagacgactgtgaatcatgaatactcatctttcacggtcgtcttcttttatctattcttttgaacttttttactttttattcaattcctgttactgtgtaatctttctcttccacggcttttttcagcacatcatcactgatctcaccgttcagtgtcactatggctgttcctgcctcatggcttacttccgccgcctctacctgatccagtgcttccagtgctttcttcactgctgcctcacaatgtccacacatcataccttcaattttgatcgtctttgtcatcatttcttcctcctgctttttcttgcttctattcgccctgacttttttgtcatgacttccatcatacattttaaaccagttcagtctcaatgcatttgttaccacgcagaaactggacaggctcatcgccgctgccccaaacattgggttcaactgccattcgaataacggaatccatactcctgctgccagcgggattccgattacattataaaagaatgcccagaatagattttcatggatattgcggagtgtcgcccggctcatccggattgctgccggaacatcgctcagtctgctcttcatcagcacaacatctgccgcatcaatggcaatatctgttcccgctccaatcgcgattcctatatctgctctcgtcagagccggagcatcattgatcccatctccgaccattgccacctttccttttttcttcagtgaacggatcactgcctcttttccttccggcagcacacctgcaatgacttcatccactcctgcctgctctccgattgcttttgcggtacgctcattatctccggtcagcataaccacccggattcccatattctgcagttcttttactgcctgtggactgtcttctttgatgacatctgcaaccgcaatgattccgatcagtttctcattttttacaaagaacagcggagtctttccctcctgtgcaaacttctgtgcctgctgctctgccgcatccggtatttcactttttgatcggatatattttaagtttccaccataaagccaggcttctcccagccttcccgaaagtccgtttcctgcaatcgcctgaaaatcttctgcctcttctttactttctactcccttttctttcgcatattccagtactgctcttgccagcggatgctcacttttcttttccagtacataggctgttctgaccagttcttcctctgaaatttcctctgccggaaaaagatccgtcactctcggttctccgcttgtgatcgttccggtcttatcaagtaccacaatctgcatctttcctgtctcttccagtgatactgctgtcttgaacatgatgccatttttcgcacccatgccatttcctaccataatcgctaccggagttgcaagtcccaacgcacatggacaactgatgacaagcactgaaatccctcttgcaagtgcaaatccgatactctgtcctgccaacagccacacaaccatcgtgatcactgcaatcgtaatgactgtcggtacaaatactcctgatacccggtctgcaactttggcgattggtgctttcgtggctgctgcatcactgaccatctgaatgatctgtgacaaagtggtatcttctccgactcttgttgcctcacagcggataaagcctgactggttcagagtcgctgcggataccgcatcccctctctttttatccaccggaatgctttcaccggtcagtgcagcttcattcactgcacttgtcccctcgatcacaattccatctaccggaatattttcccccggtctgaccacgaatacctctcctttttttacctgctcaatggatacagccagctcttctccgttccttattaccgttgctgtcttcggagcaagcttcatcaggctcttcagtgcatccgtcgtttttcctttcgatcttgcttccagcatctttcctaccgtgatcagtgtaaggatcatcgccgctgattcaaaataaaattcatgcatgaatgacatgacgccatccatatctccactgacctgaaccgcagtcatcgcatacaatgcatagacactgtagccataagatgctcctgctcccagtgccaccagtgtatccatattgggggcgaggtggatcaggcctttaaacccattgacaaagaatttctgattgatcaccatcacgatcgttgtcagaagtaactgcgtcagacccagcgcaatatgattttctgccataaaagaaggcagcggccatccccacatcatatgtcccattgatacatacatcaacgggatcagaaatatcagtgaagcgatcagtctttttttcatctttggagtttctgtatctttcagcatctcattcgctgccgcagcagatgctgctcctccgtttccggtctctgcatttttcagagatgctccgtatccggctgcctccacagcggcaataatctcggatgccaacgcagttccctccactcccatggagttagtcagcagacttaccgagcatgacgttacccctgggacattggataccgctttttctacacggctgctgcacgctgcacagctcatccctgtcacacgatattgttccatcttttcaccttcctgttctattttctggttcctgttcttccttccgattcctgttcttccttccggttcctgttcttccttccggtttctgttttactttccagacgctatacggcaatcattatttcatcagtttctgcaatgttgcaaccagttcatccactgttgcatcttttccctctcttatatcatccgccacgcaggtacgaatatggtttgcaagaagtactttattaaaactgttcaatgccgcattcacagccgagacctgtactaaaatgtccgggcaataggcatcattttctaccattctcctgatccccctgacctgcccttcgatcctgctcaatctgttcagtaaatctttatattctttttccgaacgctcctttgtcttatgacagcaacccggacagactttttcttcttccatgattatactcctttttgatcgaaattatgagagacacactttgtgggttttaataccccctataggtattcttcacattctgaattatatacccataaggggtatatttcaagtgctttttctattattttcaggattgattgtattttggagatatttcaaaaaataaaccggaaccggaaatgaatttctgtctgcttttggctttgataaaaatccttttccggttccggttcttccatttttcttttctgtaagattctattcaggatataccaggtttcggtccttcttcaggctgtcccggtattttctgatataatatttcgccatatcaagattctgttcctgataatttccacactgttccggtgctgcccccggaatctcgccttcaaatcctataataaaatcacacagatccataacaaggtcgtaaatatcttctgaatctaaattaccgaacataacaagataacatcctgtcctgcagcccatcggtccaaaataaatcacatcttctttactctcactgtttctgagataggttgccgccagatgctcgatcgtatgcagtgccggtgtatctatgaccggctctctgttcggtgctgtgatcctcagatcaaatgtcgtcgtaacacagtctcctttcgcatctcttcttgatacatacaatcccggcatgagattcagatgattgattgtaaaacttgcaattctttccattttaattcctcagtttcttttatttttcttttctgccttcttttatgtaaaacttcgaaaatcagagagaaagttcatcgatcttcttcagttcttcttcagagaactccgtattttcaatcgctttgatattgtcaagcaactgctgcggtctcgatgctcccaccagtacactggttacgattccatctcgtaaaatccagctcagagccatctctgccagagtctgtccacgtccggctgcgacctcgttcaaagcacggattttcatgagcttttcttctgtaagtgcatcctttttcaaaaatcttccatccgtcatgatccggctgtcctccgggattccattcagataacggttcgtcagaagtccctgtgccagcggactatatgcaatgattcctttcttcagttctgctgccttttctttcagaccattcttctcaatcgtccggtcaaaaatagaataacgattctgattaataataaacggacaatgaagatccttcaggatcgcagccgctttttccatggtcggtccatcataattggacagtcctacataaagtgcttttcccgactgtactgctgtagccaatgcacccatggtctcctctaatggtgtattcggatccatcctgtgatgataaaagatgtctacataatccagtcccattctctgcaggctctgatccaggcttgccagcagatactttctgcttccccagtccccgtaagggccatcccacatcagatatcccgcttttgtactgatcaccatctcatctctgtgctgtcccatctcttcttttaagattctgccaaaattcttctcggcactgcccggttccggtccgtagttattcgcaagatcaaaatgcgtgatcccattgtcaaatgccgtaaagcagatctgcttcatattttcatagacaccggtatctccaaaattatgccagaatcccagtgacacttccggtaattttaatccgctttttccacaatacacataatccattttctgatatctttcttctgcagcctgatacatactcttatacctgccactcaaaatgtgttgaaatatactcaaacacatcgagaaattgaagtccttgcggatacttcttactgcttcaatgtgtatgctttggcgattataaacaatacgctactcacaagttcttgtacacttcacagtcgtaaattcctgcgatagcccgcagtacatacttacgtttgctttcattatgcaacttcgtaagttaaagcatctcttagattaagagcagcattaaaatccctatcctcaacatagccacaatcacaacagtatattctatctgaaagcttcaaatctttcttgatagcaccacaacagtgacatattttggatgatggataccatctgtctacgactcttaattcaataccattttcatcacacttagctttaagcttagttctgaattcatagaacttttgtgatgcaacggcttttgatagatgtctgttcttcatcattcctgatatattcaaatcttcaatagttatataagatggcttggttttcactatcttggctattgatttattgatataatcagtacggatattatctattttatgatgaagtctttgcactttgagcttttgcttttgtatatttttttgagtggactctcctttctttaaattctcatacttgcgtgagagacatctttgttctctgcgcaatttcttttccaattttttaactcttgctgacttattgatatttttataagttttaccattagaaacaatcgccaagtctttcaaccccagatcaattcctataccgtcattgctattattagcaatcttagcgtcgggaatttccacaagaactgacacataatatctgcctgctttgatggatactgtaccgcttttgatattccatccgtctttagttgttggtatatagcctttttctttaatgcgtacccagcctaaagtgggtatgttcaacctatgtctctcgcatctgcaatctttaggattattctttacgaaatacatttttacatcagatttacctttctttttgaaattaggaaaagcactttgatgtttaaaaaatcttgtaaatgcagtacatccatcttcaatagacttttttacagcttttgaatacgcttctttaatccatactttttcaggattatcaggaatgtactcattattgagccatacgctaaaactcttgcccgtcataaacttttcacctttatcgtataaagctttgttgtgatcaagatagaagttgtaaacatatctacaagtgccgatagtcttgttaatcttgattttttgctcgactgtcggatttatttccgttttgaagctctttagcaatttcctcatccccttctatttgttttttatacttacgaagaccgtacaatctacaagaaaaaacgtgaagtatagatacaatatcctgtacaagctcttcttgcggtgatagttcttcattattcactaccactatggttgtattaaacttcatacagaatttttcaaaccaatcatagccaaatctgacaaatctatctttatgtgtaactatgatagttttgattttttgttccattacttcatctaataattgattccactttttacgattgtagttaagcccacttccataatcttcaatacattgatctacaatgatacctttagcattgcaaaactgacgtaaaaaagttacttggttttgcaaatcatctttttggtttcttgtagatactctggcataaataacaatctgacgattatcgttttcagtatttatgcccttaaactgaagatattggtcataagtataataacgcctatcagtcggagtccgatttgctttcagaatcccctctctatcccaacgttgtaacgttttgactgagacgcccaataattcagcaaaatcttttggtttgtaattagtgatattagatgtgttcataacaatatcctccatgagtatattttaacacatttaatcactatcggcaatgattttgattacttaaagtttcctcctatgtattccgttttgttgcaatctacggatttctattcgttattctatcacttcaaatctgttatgtcatcgctttctgcatttttaatcaaatttttattccccccattcttcacaccagctttatatcacataccttcttccaggtcccaatattttataagatgaattttctgaattttttaaaaaatacataaaatataaagaattttaattttagggtttacaaactcgtaaccttatgatattattttatttgtcgagcggaagtggcggaatggcagacgcgctagattcaggttctagtgggagttttatcctgtgggagttcaagtctcctcttccgcattgataagaaaagaaatccttgatttgaggatttctttttttgtttgaaatttgaccgggaatacttacccgacatcattatatttataccaacaaatgtaatttcctcataatctcttaataatttttataattctttttctttcccgacacaccccggacacaatttccctctataataaaatcatcaaataaagaagacggcgattgtattaattgctttttatgattgccggtcttcgcctaaaaattacgaacagtttacatatattactgcccggagcaaaagccccgggctgattttatactaaaaaatctgcttttgatcctgtaacaatctacagatcaaagcagactttcctccccatttctctcaagctatctcatacagatatacaccatataacctaaatagagcaacagcatgataatgccttcttttctgctcagccttttctttgtccacgccatcagccatacaacgatactaaagccgacaagaatcacaatatcaacaacattttccattaaaaatgcaatcggactgatggatgacgcaaccccgagtaccagcagggcaatcgccattaatatttctttcatcttaactttccttctttattctgagtcactcaggttatcttgacagtccgccatggtctttccacaatcttgccagaatctttccagcagctttccaacggcttgtgccggcacagactctgatccgttgcccgcgtatataaaaactcctcagagcaatctcgttctggggagtaaataaatctcgttctgaatagtaaagcagattaacgcttgctgaactgggaacgcttgattttactggattcttggaatgtggtgttgcaaacacgttacaaacgcaatgcttctcattactcctcaccacatctcagaactacatgtgttcaatataaaattcatcctgacaactccgcccctcattttttaatagtaatttatgctcatcatatgaacgcattccattcacccgaagtatttctcctatattctgtctgctacttggaatgattctactctgtacccaacgcatactccaatctgaattcatggttcggataccttttttcaaaaataacgatatcataaacggagcttccttgggagtaacattttccggaatctcaattgtgtatttcttttctttctcatcataatttaatattccgacaattttatttctattatttctcctgattgcgtacctgttcaaaaaagcaccaccttttccaaatcatttcccagattttattcctatatttgtaatataatcttttcccattcacttcttcatacgctttcagaaagcaccccggagttcccggtgacatttttcttgccgcccagtccagatgtttcatatcctgtaattcacaaataatatcctgcactatgtcacctcatctcaaagattttattgttcatctggctcaaattgatctggataactgtcactgccctcatatccgcacacacccattcttggagaattactaactggcaataaaaattccagttcataatcttctccctcttcatcgttttccgcctctaaacactcatcacaccaaaaaggctctccttcataatatccttctggattaacccatttcgcctcattttgttcacagttactgcaaaggattttaggaggattatttcttgataaaattacaatttcattattctttttttctccatcgcgacagctatgtatacttaataccaattctgtggttgaaccaaaatcatattcatataaaaagttatcgccgacatccacaacgtcttttaatccataattcatatttctggaaggaattccccaaaaagcatccgtatctggattgctttcatattgttcttcatgaatcgtgaatgcactcagatgtccacagcattctacccatatgtcacggataaacacatccagttcctttagcgtagtattctcgcttgcttccacaattaaccaataatctttttgatatttgccagtaataacaacctgaaaatatcgacatcttctttttcctttttcctcagcaagctttgcacttctctttttgcacgtctgcaaatgtcgtaacataccgccttttgtatactcttttccacaatacttacataatccttttgtttgaagcgccattcttctccctccaatccatctggttttcgcatacaatagcatcgaacgttttcctataacaaagtataccattatcttattaaaaaatacatagaaaaactccccaagaccgaaatcctgaggagttgtaaaaatgctatttgaaattgtctgtcctgcaacagagagcttatctcttgcgtaactgaaattaacgcttgctgaactgtggagcacgacgagctgctttgagaccgtatttcttacgttctttcatacgtgggtcacgagtcaggtaacctgcagatttaagaaccggtctgtaatcagcgtcagcctcaaggagtgctctggcgattccatgacggatagctcctgcctgtcctgtatatccaccaccacatacattaacgatgacatcaaacttgtcaactgtctctgtagccacgagcggctggcgaacaacaactttcagagtctcaagtccgagatactcatcaatgtctctcttattaatagtaatttttcctgttccaggtacaagatatactcttgcgattgatttttttcttcttcctgttccgtaatattttgcgttagccactgttatttcctcctttcaacctctacctaaaatgtaagaacttccggcttctgagcctgatttgcatgctctgggccagcgtaaacatgaagcttcttgatcatgtctcttcccataggtcctttcggaagcattcccttaacagcaagctcgattaccttctccggcttctttgcaagaagctcagcaagtgtagtctctctcattcctccaacataatcggagtgattataataaactttctgctgtaatttctttcctgttacttttactttctcagcgttcacaacgattacataatcacctgtatcgatgtgcggtgtatattccggtttgttctttcctctgagcactttagcgatctcagatgcaaggcgtcctaatgtagcaccttcagcgtcaaccacataccattttctttcaatcttatccgggttagccatataagttttcatgggtgttcctcctgtaaataatcatcaatgttcttgcttatttatttgaaatcaatatactccggggctttggtgtatatcgtttctccttatgtcatgctgtactattatagacctttcctctctgaatgtcaacatttttcttcgttcttcttctcatttttctgctgatttttttctccgtcatatctcatttttattctctttttattttcatttttattctacgttgttcaaatttcctccaaatgctataataaaagacagtagcctcactgcatatttccaacgcagtgaactaaagcagaaagaaggtacatctatgtgggcttataatgaaactttttatcagatttatccgatcgggttttgtggggctcccgttcacaatgacggagttcccgcacaccgcattttaaagatcggggactgggcggaatatctcggaaatctcggcatcggatcgatcattctcaatccgatctttgaatccgacaatcatggatatgatacaagagatttccgcaaaattgactgccgcctcggcacaaatgaagatttcagtgaagtatgtaagaaacttcattcacagaatgtcaaagtaatccttgacggtgtcttcaaccatgtcggacgcggcttctgggcgttccgggatgtccaggaaaagaaatgggactctccttataaagactggtttcatatcagtttcgacggaaacagttgttataatgatggtttctggtatgaaggctgggaaggtcattttgaactggtcaagctgaatcttcagaatccggctgttgtagattatctgctggactgtgtaaagctttggatcgaagacttcgacatcgacggactccgtctggatgttgcctattgtctggatcataattttatgaaacgcctccgcagcttctgtgaatcgatcaaaccagggtttgcactgatcggagaagtcctctttggtgactacaatctgatcgtcaatgacgagatgcttcacagttgcacgaattatgaatgctataagggaatttattccagtttcaacagcatgaatctgttcgagatcgcacattccctgaaccgtcagttcggaccggaacagtggtgtatttaccgcggaaagcatctcatgacatttgtggataatcatgatgtcacaagaatcgcaagcattctgacgaacaagaaccatttaccgttatgttacggaatcctctttggaatgccgggaatcccctgtatttattatggaagtgaatggggtgaagaaggagtgaaagctcccgataatgactatgctctccgcccgtgctttgatgcaccaaagccaaatgaactgaccgactttatctcccggctgatcgaagtaagatgcaccagtgatgctctctgcaacggttcttaccgaaatgttgtcattacgaatcatcagcttatctttgaacgccgcacagaaacagaacgcatccttgttgccatcaacgcttctgattctgacttcaccgcaggaaatggagaacttcagggatcttatattgacctgctgaagaccggtgattcatcagaagccgctccacagaccctgaacggacagctttccatgccggcttacagtgtccagtatctgaaaatgctgtgatcggcttatcgctcagtcgcaaaagacatccggtgtcagacctttttaaggctctgtcccggatgtctcttttttatcttttataactcttttcttattctttttgagctgctctttctttcctgcaattcagcagctatacttcaccatttttaaatcggataatcatctcattggtgatgctgtcccgctctggctcaaccgggatctcatctctttgaaaccattctgccatggcaagctcttcccgatccagcgtaatggcagcttctccatctaaatcacagtaaaatcccatcaggagcgtatcagtaaaagaccagggctgactcttataataacggatattctttaccttaagccctacttcttccatgacttctctctgcaccgtctcttccagagtctcaccaatctccgtaaatcccgccagcaatgcatactttttatacgttcttccagcatactttgacatcaggatcttatcaccatccgtcactccaatgatcactgccggacagatcttcgggaactccatattatggcaggattcacaatacagcattctttccttactgtcttttttcattctcctgccacattttccacaaaacctccggctctgataccagttatgaagctgatatcccgtaatcccggcaaatgcaaggtactgtggctctgcataccggaaaatctccgtattttccattgtaaaatgcgactgccgctcccggttgatctcctctacaagataataccgttctccgtcaatactgaacagatacactgcatcttcatagatatcttcattcagtcgctcgatgtcccgaaacttagggaactcgatccgatccgggtattttctcacaagagccgcatggtcttcataatacagtgcataagactcccggtcaggcggacacggatgatactggttatcaaatgtatgctctcctatatcctggatcatgcctcttcttctgctgcctcctgtgaacgggctgcatctcctttcactgcctcctcttcaaataaagatgcatcttcttcccggagcgttacatcctccgtatcatctccaggcgtctcttcctcatccactgttaccgccggcatcttttctccacaatacgggcagaagaccatctcttttgctaccatctttccacaattcgggcattttcctgctcctctgatagctgagatcttctcctcaaattctgcaatgctctcttctcttgagctgatcgcctcgcacaatccttctgccttctcatccagaactgctccactcttatactgctcatagactccccgtccaagttcctgcagatcgaccgtattctcatgtgcaaggcttctcacctgcaatttcagcttctgcgtctcgattacctctccggctttatttcctactgtcgtcgctgtctccccgatatattttcctaattcttcaaaaaaatctttcatcttttttcttctcctttccgtaaccattccgccaatcttctcctctgactgctattctcatcacacccatgggcatttcctctgaccatctttctcatcacagccatggatcattgtctccgactcctgctttcctgcggtcataaattaaattcattatacctcattcttttcctttgtgaagactgacgggcaaaaatttatagatcttttagggttataaagaaattcttaagttcatatattgacagaaaaagagtcaggaaatgtgccatgccagatttagaaacctgccgccggaacatcctttccgaagattaccgtgattttatcgagaaccggactcgcacacctctttttaatgaacttctccttcaaaatccctgtgaacaggatgccggtagtggatacacctgctattattttccaaaagaatccgtagaaccaatcacgctttcccgtttttcctataattctatcccccagtgcttttcgcccctgagtatggaaactctgaaccaggcaggaatccttccggttcagaattatcctacgctccagctaaaaggacagggggtattgatcggatttttggacagcggtattgattatacaagccgccttttccgcaatcttgacggctcgacaagaattgccgccatctgggatcagacgatccagagcggaacgcccccgcagggatttgcttacggaacggaatatacccgggaaactatcaatgccgccctttcttctgaagatcctgcatctcttgttccttccgttgatgacaccggacacgggacttttgttgccagcctcgccgcaggcggtgcagatatctccgaacagtttctcggagccgcccctgaatgtaccattgcaatggtaaaattaaaaactgccaagcaatatctgaaggaatactattgtatcgcctctgatgctgtctgctatcaggaaacggaccttctgctgggagtgaaatatctgaatgaccttgcatccgcccttgatcttccgcttgtcatgtgcattaccgtcgggacaaatatgggcggacacgtagggactctcccccttcccagccagctcggggcttacagtcttatagccaaccggatcgccgtcatcgggacaggaaatgaagccgacaaacgccatcattattacaataccatccagaatctcagcgacaccaagaccgttgagatccgggtcggggaaaatgtctccggctttatgctggaactctgggtcatgattcccaacattttatccatttccatcatttctccttccggtgaaaattcttcccggatttccttccgtgttggctcaaatgtcgaactggactttctttttgaaaaaacaaaagtttatgtcaattaccggctgatggtggaaaagaccaattctgaacttgtctttttccggtttaacacccctgctgccggaatatggaagatcgtcgtcgagccggtccgcctcattgacggacagtttcatatgtggctccccgtcacagaatttcttgatggagaagtatattttctcgaatcagatccctattacaccctgaccaatccggctaacgcaccaagtcccatcatcgtttcctattatgacgggaaaaatggcggactcgcccaggcatccggccgtggatacacccgcactcagtttcagaatccttccatcacagctcccggtatcaatgtaaaaggggcattaccgggcggacgctttaccgttcgttccggttcctgcatttccacagccatcactgccggagctgttgcacttatgctggaatgggaactggaacagaaaaatattaccggtattgatgtctttcagatcaaaagtctgctgatcctcggagcaatccgcccggattttctcgaatacccaaatcgtgaatggggatatggccagttaaacctctataatacatttgaagccatgagacagctctgacgctgtcccatggcttctctttttatggactgtaacttatcccatataattttttatcattctgcacaaagcattttaccctgtgaattttccatcccatatcccggattaccgattatcctcacggttctcataataactcttaacccgttctgattccggtacgatctgctctgctgccggagctgttcccggtgcaaatacaactttcagcataaccggtgtaataatcgttgtaattacaaccacaacgatgattggtccaagcagggcagaactcatcagccccagtgccgcacccttgctggcaacgatcagtgcaacctcacctcttgagatcataccaactccgatcctctttacctgataatttttataaccacacacttttgctccaagtccgcatccaatgatctttgtaattactgcaacgattgtcagaactactgcaaaggcaatgatcgtcatagacattttcggcagttctaccttcagtccgatgcttgcaaagaacaccggtgaaagaagcaggtaagacattgtatcaaatttagactccagataagtagaacgctgtacattggaaataataagtcctgcgatatacgctcccgtaatatctgcaactccgaatacttcctctgccacaaacgccatgatcagacagaatacaaatgcaatgatcgtatggcggtgaagttctttttctgcttcatcaacccatttcttatatatcttgtagaagatcagaccgatgatacctgaaaatgcgaagaatccaacgatcttcagcagaacgattccaagacttacagaatcatctgccatactcgtaacgatcgtcagtgcaatgattccaaggacatcatcaatgatcgctgcaccgaggatggcatttcccgaacgagtcttcagctttccaagttctttcagtgtctctactgtaatacttaccgatgtcgccgtcagaatgactccgataaagatattctgtaaaaagaccggtgaagtcacatcggactcgatcgcacccggtttattgaagaaccacgcaaccgcataacctcccgccagcggtacaagtactccaaataatgcaatgataaaagaagcttttccacttgccttaagctctttgatatctgtctccatacctgccgagaacatcagtacgattacaccaatctcggctacttcatgaataaatgaagtttctgttaataatccaaatcctgcaggtcctaaaataagtcctgcaagcaatgctcctacaacctgcggcatctggactttctttgtcagaaggcccagtacctttgttgataataaaattattgccaaatccagtaagtatctataagcatccattttttccactctcttccgttttctctattcgctgtcatctgatcccatggttctgccctactcatggaatcctcttttcttgcagtgtaccggtctttatcaaccatttaatgccggtacttcctgcccccgcagacggatgaccggtccgcctgttccttcaatataagctctggtgatcgtcacctctccgatattatcatctttcggaatctcatacatgatatccagcataaattcctctataattgcacgaagtgctcttgctccggtatctttctccatcgctttttccgcaatcgcctccaatgcactgtcatcaaaatccagtttcacttcatccagtgccagaagcttctggtactgcttcaggatcgcattcttcggctctcttaagatcttcaccagcatctctttatccagtcctttcagggtaaagatgatcggaagccttccgagaaactccgggatcatgccgaacttacgcagatcttctaccgtaacctttgacagaagattctcgtcatgttcatatgtatccttcagctctgaattaaatcccatggacgtcttcttctgaagacgttctttgatgatctcttcaatatccgggaacgctcctccgcagatgaacagaatattcttcgtgttcactgtggtcagcggaaccattgcattcttgctgttcgctcccacaggtacttctacctcactgccttctaagagcttcagcattccctgctgtacggattctccgctcacatcccgctggctggaagtctttttcttggcgatcttgtcaatctcatcaataaaaataattccctgctctgcacgttctacatcattatctgctgccgcaagcagctttgatacaacgctctcgatatcatctccgatataaccggcctctgtcagggaagtcgcatccgtgatcgccagcggcacatccagcaatcttgccagtgtcttcaccagatatgtctttccacttccggtcggtccaatcatcagcatattagatttttcaatctcaatatcatccatcgtattggttgccacccgcttataatgattatagaccgccactgccatggtcttctttgcacgttcctgacctaccacatactcatccagtctggccttgatcttatgcggtgcaggaatatttttaatatccagctccggaaattcctttggtttctcttttttcttcttgatcttttttgcttctggctgcattccttccaaatcagaaagattcagaaactgcacgcccggcatattcatcatttttcccagatccagaggactgctgctcatcgcatcaaagcttctctgcatacagtccggacacaccgtaatatgattcggaagatcgatcatcttcccggtcacactctccggtctgtgacagataaagcagatcttctcgtaaccgtcatcatcctcacgctccttttcagcgtctttgaccacttccttacgggaatcctctgtccggttctctttttcctgtggaatctcagaatctttttcttcgtccacaataacgaaatcctgatctgacatacgctttccctttcttctcctgtttcatttgcttcctgcgtcccgtcgtatcctgcctgaaaaattcataaatatcacagccagaggtctccaacctctgtttcattttgcagaatcctgacgatccgcagttcattatagtacaatcacttcaaatattcaaataaataaactgtgaactcttacacaattttaacaccacactactgttccagcatcccgatcaacgtctcttccgaaatgatcggcactccaagttctctcgcctttttgttctttgaagaagttgaatttacatcattattaatcagataaccggtctttgatgtcacactgccggttacctttcctccacgcttctctatttccgcttttacctctgcccgattggcaaaatgttccacacttcctgtgatcacgaaattgatccccgagaatttctgactgtcctctgtcacaacctccttctgcagctctacctcgtccagcagtctgcggtagatctcccgatgcttcggatcagcaaaatattctacataggtctttgccatgatcccgccaatgccctgaatctctaccagttcttcttcggttgcctcttccgcacgctttggatcatctccgaatgctttacagatgaccttcgcattggcacttccgatattcgggattccaagactgtagatcagtcgtgccagcgttgtcttccttgcgttttcaatatttctgagcagcttctgataagatttctctccaaatccatccatgctcttaatttcttcctcataccggtccagatggaacagatccgtaaaatctttcacatacccatgcagaatgaatttttccagtgtcgcctctgaaagtccttcgatattcatcgcatccctgcttacgaacaggctgaacgcttttacgtgcttcgcctgacattccgggttcgtgcagaataacgtctttgtctcattttccatggaaatctttgtcgtaccaccacagaccggacagactgtcggaatatcttttacaccgctccgtgtcagattctctgcgatctgcggaatgatcatgttggccttatacacctggatcgtatcaccgactcccagttccagctcttccataatactgatattatgcacactggcacggctgaccgtcgttccttccagttctactggttcaaaaaccgcaaccggattgatcagtcccgttcttgacggactccactcaatctcaagaagcgttgtctcccgaatctcatctgcccatttaaatgcaaaagaatctctcggaaactttgcggtcgttcccagtgactgtccataggcaatatcatcatagaccagtaccagtccgtcagacgggatttcatttttcccgattgcctttgcaaaccatgctacttcctcttcgattgtttctgccgtcacaggatgatgttccaccacatcaaatccctgctccttcagccactgcatctgatacattcttgaattatgaaaatctacctcttccgcacgcaccagcgtaaatgcgaaaaacttcacatttctttttgcggtgatctcattattcaactgcctcacagagccactgcacagatttcgcggatttttatattttgcatcgacatcttcgatcttttcattgatcgcctcaaaatctttataggaaatcactgcctctccacgcagaaccagctcaccctggtacggaatatgcagcggcacattctgaaaaacctttgcattgttcgtgatgacctctccctcgattccatttcctcttgtgaccgctttgaccagttctccgccctgatacgtgagaacaatggtcagtccgtccagtttccaggaaatcatcgctttcttcgtgccaagaaattctttcagccgctctacttcctttgtcttatccagtgacagcatcggccgctcatggcgttctttcggcagtccactgaccacctcataaccgacattgaccgtcggactgttcgccatctttgttcccagttctttttccagttcttccagttcatcatagagcctgtcatattcatagttactcatgatctctgtattgtcctgctcgtatgcctttctcgcccggttcagaagttctaccagttcccgcatccgctgctgcttactttttccctgctccattttatttttttcctgctccatcttttctctcctgcctgctttcccgtccgcccggaagactggaagactgctccagtaactgatccagctcatttaattcccggtctgtcagcttgcggtattttccctctttcagtccgtccagcgtaatattcatcacccggaccctcaaaagatcttttacctcataccccagtgcttcacacattctgcggatctgacggttcaatccctgcgtcaatatgatcttaaatgtatatttccccaatttctctactttacacggtcttgtcaccgtatccaggattgccactccccgggacattttcttaaggaaatcctctgtgatctcatgatccaccgttactttgtattctttctcatgataatttgccgccctcatgatcttattgatgatatctccattattcgtcatcaacagcagacctctggaatccttgtccagccttccgatataagtcaccctcaccggataattcaggaaacgcacaatgctgtcgcgttcccgcctttcttctgtgcagacgatgccttttggcttatttaccgcaagcacgatcatctcatcctgccttgatacggtcttatttcccactttgaccgtctgtcccggataaatcttcattcccattccggcacgctttccgtccacactcacctttccggtctcaatgaggcggtctgcctcccttctggaacacactcccgcctcacttaaatacttattcagtcttaccggttcttttttctgtataaattcttctctgatccgattactcacccgtcaacactccacttatattattatctgtaaaaaatgtatttccgctgtaaaggaacagcacctctgagatcctgtaggaactgagcagttcctcgatcgtgccactataatatctcggatcgaccacaacgatctcccggtaatacggtgttaaaaactgcacaaagcagtctgcaaaagagtccttgatcagaagcagtcttttgctttctgtcgacaccgtcttaatatctacaacagaaaaatctcctcccaaaaagacatcatactgatcctttgtatccagctttgaagaatcaaaaagagaagtcgtcctttttccttcatctacataatctacgatcacatctgtatcactgtcactcggaacataaatatcaacctgctctttctcgctcagataaacaccgcttttggatgccagcattccgttaaaatcattggaaaccgcataagatacatatttccctgaaatgtctccctctattcccagcgaaggagctgcctcctgaaatgcataaaaagcccccagggaagtccagtgatgatccgtcttataataaatcttttcattccggtgcttattcagggctgaggctgcatcgatccattcaacggaacttcccagttccttctttaccatgcttatgagctgtgtctgattctccacttctgccatagccggaagctttgctccaagaacccctgccgcatccggtacaagcatcatcctcaccggaagatccgtattcgtctcggcaaaattctgaatggatttcagattgtctgccagatattcctggttcggcagctcgatctcctccagcagttgtccgtcttttcctatgtatactccatgttccttgctgacacctgccagtctgtccacaccgaccttgatcgttctccagaaatctctgccgacaaactgatctgacatataccgctcaaacttttccatataatcgcccgaaatcacatttccccagttccatttcggagcagatgcaagcattctgttctcctgcactgacttttctttatccggtacaatgatattgatcaaaagaaatacaaacaataccaaaataaaaattgtccctgtcacccgctctaatgagcctctctgcttctttttcttcatactctttcacctgaatcagccctttggctacgcattttcattcaccttctggctccggtctttcttcttttaaaatctgaaatataaaaatggctgatatgtctctgttaccagaaatgccaccgaaattgccatcattccgaaaaataaaatcccagctacaactgttcgtgccgtctcactctccggcaaactgatgatccttctcagcaatctgcctccaaatgccgacattccgaccaccgccagcagataatacagccagtgggaaaagaagacataccctgcccccgcatccagcagcccgccccctgttccgaccattgctccaagataacggaaggctgctcccaggctcggactaaagaagaagacccagccgaccagcacgcagactgccgtatagattcttctgagcggtgacggcaaccggtccacttctgaaccccatacatatttttccatcaccatcaggactccgtaataaaatccccacacaataaaattccaggcagctccatgccacattcccgtcagcgtccagacgatcagcagattcaggatatgccttcctccactgcaatggtttccgcccaaagggatatagacgtattcacgaaaccaggtactcaatgaaatatgccatcttctccaaaattccgtcacacttctcgacacataaggatgatcaaaattcttcttcagttcaaaaccgaacatcctcgaaagtccgatcgccatatcagaatatccgctaaaatcataatagatctcaaacgcatatgtgatacagccgatccatgccatcggaacagaaaggttacttgctgaaatggctgaaatctcctcaaatactgtcttaaatgtatccgcaagtactgccttttttgcaagaccgatcaggaacaacattgccccctgtcccagctttcttgcggagactttcctctgtgcaagctgtggttctatatcttcataccgcacaatcggccccgcgatcagttgcgggaacagggcgatataaagtgcaaaattcaaaagactcctctgtgcctttgcttttccccgatagacatccaccacataggaaatgccctgaaaagtatagaaagaaatccccaccggcagagccagttcgcggtaagtaagttccgctgaagtcacggaattgaccagttccaggaaaaatccgtaatacttaaagaaaaacaaaagagccagattcacaaccaccgtaaagatcattccccggtgagcctttctctcatcctctgcatttgccgcaatctctcttccacagcaataattcagaagaatacttaagatcatcagaaccacatacaccggttcaccccatgcataaaagatcaggcttgccagcagaagtagtaagttgcgtatcttaagcggtgcgagataatatactgccagaacgaccggcaaaaataaaaatataaacgtaagactgctaaataacatccttctttcccttctacaagctctggtcaaaagcagctctgtactcagatgcctttgaagatactacataaaaaatataattcccacggacactggtctgtgcctcttccaaaagtttctcctgctccggcagatatccctcaaaatcttttttccgctcctgcacccgctgttctaccgcatctgtcacctgctccgtctgactgctctttttgacacagatcatcaggacttcctcggcatcgatacttgattcagaagaataatacatcacgccctcataatctgtactgttcagcccgaagttccgcttgagcatctgaccgtccagtttcttcattccggtcgtatcaatgactttctccatggaactctccatctctgaaaaagagcggttacttccgcttacataaatcataagcagggcaatataaccgagaatcagaatggacaccgcatacgatgcagctttccatattccctgtctctgtcttatcataatgttgctacctccgccatattcgttgcccagaccggataaaattctgccttgaaatgaatcccgtcttcttcataataattttcctgcacaagtccggtattatcaataaatcccaaatgctttccatcgcacatttcctgcaatgcagtattataatctgcaattttcgccagtgccggttctttttcagccgcagatgcactgaccggaaagatcgaattgatataaatacggacggacggcatctctttcgtgatcgactcgatcaccgctgcatatttcttaataaacgcttctgtatctccgtctgttgcgatcacatcattcatcccatacgacaggaacacgacctgtgggttcagcttttttgcctgactgatctgctcgtccagtccctccagttgtatccccctctttgcaacaacacttgaggcattcagtacgtcatattcactgaatccactgctgattgaatctcccatcaccactgcacctgaaaaacgatctttcagacttctctctgtatcccctgatgccgggtcttttgcctccaggctggcaatcttctgctcgatcaccttgacctcttcattttcctttgactgaatatattcaattcccttttttgtatctgcattttctgctgtaaactgcttcactccgtggatcacgactcccagaagaatcagcacagtaatacagcctgctccaatatagattcgtgaaatttttttctttcttttttccattcttttctctctttcaagactgagatttctaactatttataatacgtttttttcagataaaagtcaatcttcctgtttcgtcccggtttctttccgtacacccgtttcaccactctttctgccctgtttctttcccgttttcttttacatccggattccacaggaaattatttgacatctatccctctccgattctataattaacgagatgtcaggggcaaaaggtctgaaaccacgtgtgcttgcacataggtgggtgaaagaccttaggacccaccccgataggagcagaaaagtgggatgataatcccacgatatgcgaatattgggaggattgtgggagtgcgtagcacggagcaatccgtaggcatcaaagtcgggggcttttgaccccgacatctatcataaaggaaagacagaggacaaaatcatgacaaatgaaaaaaaagaaactcccgtcgctgctgtcagcacggaaaatatttatcgtctgaacggacgtgttccactggggaaagcaattccttttggtcttcagcacgtactggcaatgttcgtctccaatcttgcaccggttctgattgtatgcagcgccgcactggtacgtggatccggtgagccactgacaggtgctgagatcacccagcttctccagtgtgctatgtttgctgccggaatcggtacatgtatgcagttgtatccgatctggaagattggatcaagacttcctattgtaatgggtgtcagttttacatttctcggaagtcttctgatgatctgtactaatcccgaactcggatatgaaggaatgatcggggcagtcatccttggcggtatttttgaaggcctggttggtttaagtgccaaatactggaaacgttttcttactcctgtggtatcagcctgcgtggtcatcgccatcggttactccctgctatccgtcggaatggattcctggggcggtggtaatggtgcagaagacttcggttcctggtatcatttactgatcggactgatcacactggttgtatgtctggtttcccgttatctcctgaaaggtgtctataagaacctgaacattctggtcggactgatcgtcggatatatcatttctgcactttttacagttacaggggtcgcaaaaatgatcaacttctccagcatcggaacaaccatccaccaggttggatatttcagtcttccgaaactggtcttcttcacggatcacaaaccggtctttgatcttggggcttttctcacgattgcgatcgtattccttgtatctgccgcagagacaaccggtgctacaacggctgttgcaaccggtgctctccaccgtgatctgaaaatggaagaactgcagggttctcttgctgtagacggcttttccagtgccatttccggctgcttcggatgccttccgctgacttctttcagtcagaatgtaggactggtgaccatgaccggtgtaatcaaccgatttacgatcctgatgggagcattaatcctgattcttgcctctcttttcccgccgctgggagcattcttcaactctctcccacaggctgttcttggaggctgtactgttatgatgttcggatcgatcatgtatgagggaatcaagatgctgaaagaatgtaaattcgatgaccggacaatgatcatcgtttccctttcttttgcaatcggtgtcggactgacccagacttccggaaactttttctccgccttcccatctgaagtcggtgatattttcaacggaaatgcagttgcaggagtttttgttgtctccctgctcttaagtctgatcctgccaaagcacaaagaagaagcttaatttattaagttttctgatctgcatggagcaacgagactttattttcccgaaaggattttaactatgatttcactgacattgacgaatgttaaaaaatttatgtcccagcttctgatgacagagactttcgaccgcttttcttttattgaaggcgagatcgtaacttttaacacgttcaaactggatggatatctccaaaaagatttttttgatgcaccggacggatacgaatctgaatcttctcccactcctttggaagaatattcccgctggggagatatccgggaattttgcttttccctcatcaaaggaaagcggacacctttgagtttccgcttgatcctgagtctgtcaccggataatatcgtccggcttatggagcagactgttcctgaaatgtccccggaagatgtgcagggactttacctgaatctgaaattcgacggtatgcatctgacctgtattaccggaacttctttccgtacttttacaatggataaatctttagaacatgcctgggatgaaatggtaaagaaattctttctaaaaaaagaaattgaatttgagattgcgtaaggaaggtaaatttgtatttgttggggtgaaaatatcgcaacagcaggaagtgtttctgacagaagagcgtccatatccgcccttgttgttgcatcgcagtgcaggacccgctttacctcagcccgttgacaacttgtaacaggaacgtggaaacactcgtgcagaggcactcctgtttacgttccttaacaagttgggcaaagtgtcttcggaacgctccctgtcaatgcactgctcacgcaacagcaagggcggatattggatttttcaaatcagaatgcttttctcgcaccggaacattttctctcaacaaacacgaaatttcaaataagaagtagaaagccggatggctatcaactaagataaatgatctgtccaatagtaaagatgtcggggtcaaaagcccccgactttgatgcctacggattgctccgtgctacgcactcccacaatcctaccgaatattcgcatatcgtgggattatcatcccacttttatgctcatatcggggcgggttctaaggtctttcacccacctatgagcaagctcatgtgggcttagaccttttgaccctggcatctagtcaatacaatatctactatctaatatttacgatcgaatatcttagtcaatagccatccggcttttttctattttttttaaatttgcattgttgagtgaatacgctgtggagctaaaaacttcttatcgagatggtcagcggaaagcagggtgttcctgagcaggtgcattagcagggagcgttccgaagacactttgcagcgtttgttagagaaagtaaatcgagtgccattgcacgaagatttccactttcgagttacaaacggtcaacgggctgaggtaaagcgggcctgcactgcgaaggaatatccctgctttccgcgtccgattcgtcacaaagaagtctttttctttacaagcgtatctcccaaacaactacaaatttaaacaggtattactttgtcagtaacatcataatctcattacttctctgaacaaatgctgtcatttcttccggacttaacggcttatgtgccagcattgcaagatcatacaactgcttgcagatgaccggtacattcttgctccgcttatgctctacaaggaactgtaccagtggatgatttgcattcagtaccagcgttgcctgactgccaaacatagacggatccattccgctcatgccatacatcttcatcatctcctgcattcttctgttctcttctgacagaactgccattgatgcaaccttatcatctttcagcttttcaacttttacttccagcttatcattaccaagctcttttctgaagatctccaccagactttctgctgtcttctggaatgcttctttctcatcttctgccacttcatctttcagagaatcatgcacatctgcatcaattcttaagaactgaacttcctgatgcttctgctccagataagtgataaatgcagaatcaatattgtgcgtcaggatgatcgcatcctgtccctgtgccttgaacatattgatatactggctctgctgtacctcatcggttacatagaaaatccttgtcttctccggctctttttcagcatctgcatccgtggattctgcctcttctgactttgcttctgcctcagtatttcctgcttttgactcttcattctttgcagcctcttcttttgcagcttcttccacctcagcctcgcctttggcttctttgatgatatcttccagtgtcagatacttatgctcaagattcttataaagcatggaatctttcatcttctcaccgaatttttcatctttcaggcatccaaacttgatgaacggactgatatcgtcccagtatttttcataattctcacggtctgtcttaaacatgccattgagtttatctgctactttcttagaaatataatccgcaactttatttacgaatccatcattctgcaatgcacttcttgatacattcagcggcagatccgggcaatcaatgactcctttcagtaccatcaggaactccggaatcacttctttaatattatcggcaataaatacctggttgttatacagtttgatctttccttcaatagattcatactctgtattgatcttcgggaaataaaggattccctttaaattaaatggataatccatatttaagtggatccagaataatggttctttgtagtccataaataccttgcggtagaactcaatatattcttccttcgtacactcactcggattttttgtccacagcggatggatatcgctgatggaaaccgggcgtcttacaatctttgccttctgctttggctcaccctcttcgccttcctttggctcttctgtgatatgctcaacaacggtatctgtatcgagtacatcagcttcatcaatggtatcatactccggttctgcatttgctctggaaaggaagatctctaccggcataaaagagcagtatctctcaagcacttctcttgcacggtattcatttgcaaattccaggctgtcttcattcagatacagagtgatctcacttccaacggtcgttctgctgccttcctgcatctcatactctgtaccaccttcacttgcccagtgaaccggttttgcaccttctttataggaaagtgtatcaatctgaacttcatctgctaccataaatgcggagtagaatccaagtccgaaatgaccgatcatatcatcctctgtcgtcttgtctttatacttctcaaggaactgcgttgcacctgaaaatgcaatctgcgtaatatactcttctacttcttccgctgtcattccaagtccgttatcaataaatttcatcgtcttctcttccggattgacaatgacttcaatctttggcttataaccctccgggagttcatactcgcccatcatatccagctttttcagcttggtgatcgcatcacatccgttggacaccagctcacggacaaaaatatcatgatccgaataaacccatttcttaataatcgggaaaatattttcgctgtcgattgataaagtacctttcttaactgccattttactgcactccttttttatttgttcacaatctgtgatccttttgtattctttctgcatgcttttacatagcatatttattacctaatggacattctagtacagcaaaatttaaaagtcaatagaaaattagcactcttttaaatagagtgctaataattttataaaaataataagatgttgggagcaaaagcccccaacaatgatgccaacggattgtttcgcactacgcactcccacaatcctgcccaatattcgcatatcgtgggattatactgtctccggctcaggatactcttctccaaatgtctccacagtcacttttttcataacctgcttctccagcggacggtcactgtaatcggttgctgtctcagcaatcttgttcacaacatccattccctctgtaatcttaccaaatgcggcataagctccatccagatgcggtgctttcttatgcatgataaagaactggcttcctgctgaatccggatgcattgcacgtgccatggaaaggactccggcatcatgtgcgagatcattcgtcacaccattctgtgcaaactcacctttgatcgaatatcccggaccgcccattccggttccgtccgggcatcccccctgaatcataaatccgctgatcacacgatgaaagatcagtccgtcataaaaacctttttttacgagagatacaaaattattcactgtattcggtgcgatctccggatacagttctgctttcataatatcgccattttccatttcaaatgtaactactggatttgccataataatttcctcttttcttctgatatttataaatcctgtcttctaaaatattgtagcggattgccccataaaggtcaacccgcccattcttacagaatatcaatatgattgtttttacaaaataccactatgtttgttcttacagaatgtcaatatgttctcctgccagtgccttattcatactgcggactgcacagaatttaccgcacatactgcatgtatcgctgtggtcatcttccggcagacggtcatcccggattgcttttgcagtttccggatctaatgcacattcaaactgtgcatcccaatccagtacccggcgtgcatcggccatcttatcatcaatatctcttgcatgtgggattcccttggctatatctgctgcatgagctgcaatctttgatgcaataattccctgctttacatcctcaacatttggaagggcaagatgctctgccggtgtaacgtaacaaaggaatgctgctccgttcattgctgccacagcaccaccgattgctgccgtaatgtgatcgtaccccggtgcaatatccgtaaccaatggtccaagtacgtagaacggtgctcccatacagatcgtctgctgaactttcatattggctgctacctgatccaacggcacatgtcccggtccttctaccataacctgcacattatgatcccaggcacgctttgtcagctcacccaggcggacaagctcctcaatctgacatacatcggtcgcatctgccaggcatcccggtctgcacgcatctcccagtgagattgtcacatcatattcttcacaaatatcaaggatttcatcataatattcataaaatggattttcttctcctgtcatgctcatccacgcaaagacaagacttccgccacgactgacgatattcatctttcttttatgcttcttgatctgatcgatcgtctttcttgtaattccgcagtgcagcgtcacaaaatctactcggtcctgtgcgtgcagacgtacaacatccacaaaatcttttgccgtcagctctgacagatctctctgataatgaatcacactgtcataaaccggaacggttccaatcattgccggacactcgcttgtcagcttctgacggaacggctgcgtattcccgtggctggaaagatccatgatcgcctcagccccgagattgaccgcactcatgaccttctgcatctctatatcataatctttacagtctcttgatactccaagattgacattgatcttggtacggagcatacttcctaccccttccggatccaatgacttatgtaatttgttcgcacagattgctacttttccctcagccaccagttctcttaatttttctaccggcataaattccttttctgccacgatcttcatctgctctgtgatgattcccttccttgccgcatccatctgcgtcgtatattctgccatttttcctctccttttctgcttatttgtctctgattttttctttagaactacttattcaaaaattatttttcccagtgtatgatccatcggtcccgaacctgctcctaaatccagttgttcttttaatgcctccgtcagatattcttttgccttctgcaccgcctcttccattcctgcaccttttgcaagattcgaggcgatcgcactggaaagagtacaaccggttccgtgggtattgggattttccacccgctcaccacagatccagacttttttctcccccgtacagaggaaatcatttgcatcgttgatccgatgaccacctttcaataaaactgcacagccatactcctctacaatcttttccgctgctgactccatatcctgtgcatttttaatcttccttccgctaagcacctctgcctccgggatattcggtgtgatcagctccgccagcggaaaaagctctttcttcagagattgctccgcatctttctgtatcagccgatgaccactggttgataccatcaccggatcaagaacgatatgctctgcctgatattctttcagcttttctgccacaacatgaatgatttccccggaagaaagcattccgatcttcacagcatccgggcgaatatctgtaaaaatactgtctatctgctgcccggcaaactccggtgtcacttccatgattccctgtactccggtggtattctgtgccgtcaatgccatgacagcactcattccatacacaccattggctgccattgtcttaagatctgcctggattcctgctcctccactgcagtcacttcctgcgatggtaagcacctttttcatttcaaatgctttcaaaaaacgtcgcaccatctccggcttgtcttttgctgcaaataatccgctcactacagctactccgtcaatgcctgttccagtcagttcttttatattttctgcggtgattccgccgatggctacaaccgggatctccactgcctcgcagattgcacacagttcctctttcgcaagagtcgtcacatctgacttggtctgacttccaaagactgcaccgcatccaatgtagtctgcacctgccttttgtgcctgcagagcttcttttacattatgggcactgcccccgataataaaatcttctcccagcagttctctcgccttttcaattcccatatcagacagccccacatgaactccggctgcaccgatctttttggcaagatccggccggtcatttacaatcaatggcacatggtgctttctacagatctcatttaatttctttccttctgaaataatttcttcatccgaagcgtgtttctcccggagctgtacacacgtcacgcctgaacgcaccagtgtctccactactgtctccagtgtctcgccctccgcgagccattttctgtctgtcaccgcataaagcctgagctgctccggtgaaatatatctttttttgttctgtttcatcctgctctgcacctccattctcctgcctcgctccatttccatcttcaatgacaaagcatccagcagccttatctgaaaacttcctattccttcctctttttcatccacagtctccccggctctttccgcacagtgtcgccatgtttcagccgcttcagccgcggcctcaaaagagtctgttccgtctccgcattttaatgcacataatgcggaaagcatacagccgcttccggtaattctgcagattcgtccatcccctcctgagataactttcactcgttctccatcagagatcacatcctgctccccggtcatacaaaccgtacaacgatatttttttgccagtctgactgccagcctccgggctttttccagctccagttccagtgagctttctactccaccactctggattcctgaaaatactgcatcaccatcctgctgacagctttctgccgttccttctattttctgcctttcagttcctaaaaccagaaattccttttcatcctctgcacgcaataatgcagacgcttcttcctgattgcatcttataatagaaggaacgaccgattgcagaagctgttcgatcttctttctccggaatttgctggcccctgcaccgaccggatccagcactaccggatgccccagtctgttcgcacattttccggcaagaatacaggatctgatctttctttcgtccggcacaccggtattcagtaaagtggcctgacagatcgccgtgatctcttccacttcctgttcatcctgtgccatgactgcacttccgcctgcagccagaagtacattcgccacactttgcatcgtaaccggattggtaaggcagtgtacttttacattcttttccatttattaattctccctcatctgctccaggacatggcttttttcaagaacccgaaggacgatatacgctaaaatacttcctgcaagcgtggaaataaaaaatggaatcatataaaccgtaaagcctcccggctcaagccccattagaagctttgccaccggataagctgcaagtcctcccagtactcctgtcccaagtgcttctgcgatacatgttacatccagccgttttgtaaaatgataaacgattccacagcacaatgcccctaccatactgcccggaaaagcaagcaggcttccaattcccatgagatttctcagaaagctcgcacaaaatgcgatccccactccccaccatggtccaagtattactgcggcaaatacatttaccatatgctgtaccggtgcacacttacttcctgctaccggcacgctgagcagactgcccgcaacggctgccgctgtcagcagacctgcaaccgccagttttgccgttgtactatgcgttgtcctgttcttctgcattttatcagttcctcctacttgtatgaaatgatgtcggggtcaaaagatagaaaaaagagactcccataggggaatctctgctgctttttcgctatttccctacgttggcattatccaaatcaggttgcgggtcgaaaccagtcagtctcctctcagccggcttcagccagctccccttcttcatcggtatgattatataacggttctttctttttttcaactcttgtatggttgaattgtacaattttactttccttttttagttactcgttacattgccctgaaaataaatcaggtttatactgactctatgagttatttagtatttcattgatttaaggaggcactcaaaatggcaagtttatcccttaagggtatccagaaaatttatcctaacggattccacgcagtaaaagatttcaaccttgagatcgcagacaaagagtttatcatctttgtaggaccttcaggatgtggtaaatctacaactcttcgtatgatcgccggactggaagatatctcagacggaacattcaagatcgacggaaaagtaatgaacaatgttgaggcaaaagaccgtgatatcgcaatggtattccagaactacgctctgtatcctcacatgacagtatatgataatatggcattcggactgaaacttcgtaaagttccgaaggctgagatcgacaaaaaggtcagagaagcagcaagaatcctcgaccttgagaaacttcttgaccgtaagccgaaggctctttccggtggacagagacagcgtgttgccatgggtcgtgctatcgttcgtaatcctaaggtattccttatggacgagcctctttccaacctggatgcaaagctgagagttcagatgcgtatcgagatttccaagcttcatgagaatcttggtgcaacgatcatctacgttactcatgaccagacagaggctatgacactcggaacaagaatcgttgttatgaaagacggagttgttcagcaggtagatacacctcaggcactttacaatacaccttgcaacctgttcgttgccggattcatcggatctccgcagatgaacttcatggatgccaagtgtgcagtaaatggagaggatgttactcttacagttggaaagcatgtactgaaagttcctgcttccaaaaagaaagcactgatcgaaggcggttatgatggaaagacagttgttcttggaatccgtcctgaagatgttcatgattctcaggcattcatcaacaactctgctgacagcgtgatcgaatctacgatcaaagtatacgaacttcttggagctgaagtattcctgtacttcgatatcgagggaactcagatgacagcacgtgttaacccacgtacaacactcagaacaggtgataaagctgtattcgctcttgatatggagaagatccacgtattcgacaaagagactgagttgactattacaaactaatagtataaaatgagggggttgtacttattaagtgcaaccctttttattattctgtaaaaagatctgcacagcacagattttttacactgggctatttacccccgacatcatttaatttattttggagaaaattcatggaacagaccccggaacttacaaaagcactcagcgaattaaagcgtctcaccggactgacaatgcagatcaccgctgatacccctgaagagactgctactgccctggagcagatccgctgtctttgtactgcttatcgtgaaaaatataataaaaatgattttcttctgagcctgatgaagaacggtattccggcttatgatatttacgagcgtgccggacgtcttcatatcccggttgaagaaaagcgggtgatctatctgctgaagacaaaagaactcactgatacgatcattgagatcctgagaaatctttttccccgcagagcaaaaacctatcttgttccggtcagcaaggatatactttctatccttcacccggtcaggtcagcctcttccgaagatgagatccgaaaaaccgcccatatcatcgtagatacgctcaataccgaggctctcgcccacgttcagattgcctacagtagcgtgattgaaaatcttgccaaactgcccggtgctttccgtgaaagtactttagcgttgaaggtcggtgagcttttttactctgaacagatcgtatttccgtataatgagcttggaatcggacgcctgatctatcaacttccggtatctttatgcgaaagctttctttcggagatttttggtgagaaagttcccgatggctttgacgaagagactacgcttgcggtaaaccgctttcttcagaacaatctgaatattgcagaaactgcccgtcagcttcatatgcaccggaataccctgatctatcgtctggagcagattcagaagcggaccggtcttgatctaaggtgctttgaagatgccatgacgttcaaaattgcaactatggtaatgaattatctccattcagaaaggaaatcataaatatgaatgacgctttatacgaacagcttgtatcctgcagaacgaaaccgctttattatatcctgcttggtggtgcttttctccttgcagttctgattgcagttttggggacaatgttctttggagttttctctttcattgcaggtgcattgatcgcattgatcgcttactatttcatttctccgcagttaagtgtagaatatgaatataccattttaaatcatgaccttcagatcgatgcaatctacaataaatcaagaagaaagccaaagatgactttagatatccagactgccgagatcattgctccaaaagattcacaccgtatggattcttaccggccggaaaagacttatgatttttcctccggtcgctcctcagaaaagacttatgcgatcatgatctcctataagcagcagaatgcctgtgtcctgatcgatcctgataccagaatggtagatcatatggtacagtggatgggatctaaaatgttcactgactaaatttataattattttgtaactgttcagagccaagcaaaatttcataaaacaggtgtaaaatgcttgcatttttaagactgtttttgaaattttatttggcggatacgccacaccgacgaaatgcgtagcattttggaggttggctctgaacagttacattatttttatgctcatatcgggtaggattgtgggagtgcgtagcacggagcaatccgtaggcaccaaagtcgggggcttttgaccccgacatcttatttattgtattcagttctcaggtttcatcaaatatatcttgaatctcattctgcgtcagatgattttgttcaagaagtttcttcgcaagtgcttccactttctcacgcccggaacagatcagattttccgtctctttcatctgctctttcaagagccggtttgtccgctcaataaattcttttgccagtgttgtattaagaatttgctccggagacaggcagacaagattctcttcatccataccataggttgcgatcacccgcatagccatatctgttgctgaacgtaaatcacttgaagcacctgtattcagtgatgcctctcttccaaaaaataccttttctgcggctcttcccgccagtgacgttctgatctttcccagcagatcctccctggaataattcggcttattttcggaattttcatgctgcatatatccgccaaaatttccacgtgatacgatcgtcacataagacggcttctctccggcacaccacgcagcataggcatgacctgactcatggattgccacggactcataatagccttgctcccaggtctttttctctccataattatattcttctaatgcatccagaagcctctctcctgacaactctgttcctgcctttgcagcattccgcatcgcaagttctatgacattttgaagaattgcaatactctgccccgttgttcttgccgccagattagaaataatatcttctgaaattttattctttcctttttgattcaacttcaattccaaatactgcttacgttcttcctcatttggaagatccacataaatccgattatcaaatcttcggagcaaagccggatctatccttcgtttcttaccagatacacttccatccagatcataatttgttgctgcaagaacaaaaaccggttctttcacattttcgcgaaatccatccatttccgtcaacaacgtattcagcatggactccgtgtgctggctggtcgtatctcctgttcgttcctttgcgattgcatcaatctcatcaataaatatgatcgccggagcatattttcttgcagtcctgaacaaccgccggatattttcctcactctttccgacatatgaattcataaactgcgtggcactggtctcaagaaatgcaacatctgactcccctgccatagccctggcaagcatcgtctttccggtacccggtggtccatacagaagcacccctttgggaagtctgcgtccttccatggaatactttttcgggttctttaaaaattctgtaaaccaggcaagctctgtcttcgcattctctgccccgatcacttctgagaattttgttgtcggacgctgggcatccttcatgatcgcactctggctgtccatatccacagccatcctctttttcagatcatgatactgaataaataatctcttttcatctgatgaaagaatctgtgctgtattgaaatcaagcacataacctcttttggcaaactctctgctcttttcctccataaaaatctcttccagtatctgatcaatctgtcgctccacagtttccggagccaatggattaacaggaacaattcctgccatgcctcgttgatagagcgaatttttatcaaccaccgaaaaaattttttcaaattcaataaaatagattggaagatttatttctgattctatcagttctgtaaaaaacgacattccctcagaatacatatcatcaatacttacgccactctcatgttctttattttctccgtagtatggatcaatcagcaccattgccacatctgtgtgcagtaatttttctgcctctttcctttcgctgaccctgatcatttctgcgattttgttcacttcattaaaatacgaaaattcctcatccgtacacatcacaaggactttcgctcttttttcatttacaaacagttttaaaatctccgccggcatttcttttttattaattttaaaatgtacattttctacctgatccatcaatgctttttgatttcctaactgtctcgataattcaaagatctccctctcaagaaaattctttccctgtgcagatgcaattcttgcatctgtcagtccgccataatgatatagaaacaataacgacagatccttatcataagtaatctgataccccagcctctgctcaactgccctgcttacttctgcgaactgcgtctctatcattttcacaagatgtctggttttgagatggttgaacataatgatatttcctgaggcaatcctggagcagattgcctcagggaaaagctgctccccggtatatggatttttatctttcctgatggcatcaagcagaacgctcttaggcatccttgtatagtcaccgctcgtcccatcttcatacaaagcttttcctgcattcgatgtaaaaatgataatactttctgaaaaatcctcgtcctgatccagaaaatcattatgtaaaagtccccggtcaagaatctgcaaaaataagtgaatcacttttctgtccgctttttctatctcatcaaagatcaagattccatccggatttttcctcacgaaccttacaagccgcccctcttccgctcccgaaaattttttagaacttcccatcagttcggtaatggaagatggatttgaatattcgctcatattaaatacaatcgtcttttttccgagatactctgctcctgtctctgcaagaagagtctttccaactcccggaggccctgcaaataagaacactgccgcaggtctttttcttttttccaggatatgaaatacctcccctcgaaagcagccctgaacaaattccattactgcttcgtcctggcccttaacagtatccagcagacggcttgtcaactgctgatatttcactgataattgtcggaaatctatcttttccgtctctggtgattttttcactccgggatgattgtctttttccgcattctctatcttttctgatcctgacgtctcttttaattctactgacttctctgatcctgatgcctcgtctaatcctgatgccttgtctgattctgatgtcttatctgattctgatgtcttatctgattctgatgccttgtctttctgagctttcatcctattttctttttcctgctttaattcatgcagacatttaaaatatttttcctgatccgtttcttttttaaaccagtttaattctatttttccacttttcagcagctctctcatcaactctcctgaagaaaacggcatccccgacattctccaccctttaaaaagttgatctacgtttacccacgaatcctcccccagcaatggaaataaagttggtattcttgcttttgcatagctatacaaaatctcattttcttccaggaccttccgtgctttttcaatatcagccctttcttcttctgaaaataaaagattcagagtcttctcatccatctgaaaaagaagtgaatatccgtataaaatatgatagcccgtcactcccgtttcttctttcagggaagggactgttcgtgccatttgtattgcaaccttatatacattatgactcatctttttctcctcgtaacctataaaacttcgtctgataaagctacagtaatacactgcattttgcaattttttattgcaataataaaagccccaggaaagataactttcctacaaagtctctcccccggggatctttcttttcaattaaattcaactatgcccacaatgccttcatgatcgtcggatatgcctcatcacaaattcctacagttctgtaaatcagctctttacattcctcaccacaggtatccatatccaggattgcatccatctttactataagttcattatcagtatttataacgaaagtacaccatctgaaattcagattcaactcattgataaccggataaattttttctttcagattttccgggattttcacatattcctttgttctgatatgcacatagttgccatcctcatcaaaaaaaagataaagttcgagatgatctatattatcaagacctcccattccagtctcgataacatcttcatcctctcctaaaagtgtatgctgaaaatcatctgctgtcagatatgctgacaccatctttgctgtcatatttgccatgtccgttcctcctgcgtatttctttttagatgatgtcggggtcaaaagccccaacaatgatgccaacggattgctccgtgctacgcactcccacaatcctacccaatattcgcatatcgtgggattatcatcccacttttatgctcatatcggggcgggtctcaaggtcattctaccaccagtgtgcaagcacacgtggtttcagaccttttgaccctgacatctttagtttattgtatcattttttcaaatccaattctacttttttctccattgtcaccaaattttgtcaccaaatttacatctccgttcactgtcagtctgtaaattatactgaaatccctgccatatacacaggtcagctctgtccttctacaagatggctctgttcagtcattccgcaagatatttgcatgccgcaagtgcagccactgctccatctgccgctgccgtcgtaagctggcggacttcctttgtccggcagtctccggctgcaaagattcccgctcctgatgtcatacagtcttctgctgcaagaataaatccgtctgcatccagtttcacgacattttcaaacggatcattcttcgggatctgtcccacagcaacaaatactcccgatacaggcaatttcttcttttctcccgtcttcagattctgaagttccaatccttctacctgaatttctccacagatttctttcacaactgaatctaaaataaaagtaacattttcctttttcttaagtccctcaacgattcgttcctcaccccggaatgaatctctccggtgtatcagataaaccttactgcaatattctgataaaaattcggcatcctgaagagcggtacttccgcctccgacaaccgcaacttcctttccccggaagaacattccgtcacaggtcgcacaataagaaactcccgcacctgtcagacgttcttctccgggaacgcccaaatgccggtgcgtcactcctgttgccagaataatactcttacaaggatattctctctcagtcgttacaatgatcttgatcccgtcttcttctaaaatccccgtcacacgttctctcaccggctctgtcccaagcttcatcgcctgatccagcagattcatggaaaactcactgccgctgacactggcgatacccggataattttccacctttggtgacgttgtgatctgaccgccaaaagctcctccctcgattaccaatgttctttttcctgcacgctgtccataaatcgctgccgtaagtcctgcagtccccccaccgataattccaatatcatacatcatgttctgtcttcccttaccttttctgcaaatttcttcttaccaatcttcccgcagatcgctttctacaaacttcttgaaacctctgcacatgccttttctgcttcgatcactgcactccggaaaccgctttgttccaggacacggaccgcttcgatcgtcgttcccgccggagagcagaccatatctttcagttctccgggatgctttttggtttccaaaaccatttttgcacttccataaactgcctgtgcagcaaactcatatgcctgtgcccgtggcattccctccgcaactgctccgtctgccatcgcctcgatcagcataaagacatatgccggagaacttccgcttacagccacaaccgcatcgatcatatgctccggtacgacctctacttttccaaaagctcccagtaatttaagtgcatatgctttgtccttctctgtcacatactgattcgggcaggctgccgtcatcccctcgcctaccaacgccggagtattcggcatggtacgcacgatcctgaccggtttgccaaactgctcttccaaccatgccagtgtctttcccggtgcgatcgtaatgaccatctggtcttctcttacggattcccggatttcctgaatcgtctctgcataaaactgcggttttacagaaagcaccaatatgtctgccttctctgccacttctttattatccgctgtcacctggattccatacagttctttcacatgatttcttcccgtttccataatatctgatccaatgatctcttctgcaggaatgattccttttttaatgatgcctcccatgattgctcctgccatatttcctgttccgataaaacctaatttcatgtcacattcctcctgtatcaataatttctgcagaatctttccacaggatgcccttgaagaatcctttgcagcatcctctgctttttctcctgcttcttctcttatttcacccagaaactgttctcctgctccacaggaatttcttttgtatccatccagtctatggtaataaactgattatgattcaaccctacaagcagtttattgatcaacatttcccgcccctggatttcaagtgtcactgttccgtcccattcatttcgcacccatccggtcagccccagtgactgggcaagatatttcgccgtatagcggaatcccactccctgaacccgtccgtggaatacaattctttttctgatatcagccataagatctctcctcttttttgtacgctgttcattgctattctatcacaagttttctttttctgacaacttcctatagcattttcataattttttaactcttttcctttcgacactttcatttacaaattttcaacaaaatgatataattttctcaatatttcttctgtgaggagggaactatgaaggaagaatttcacttgatcgatcaattagaaatagatcagtttctttcacgcgatgaatggatctttctgatcgaacaccgttctgatgcactggaacgatatctttttgaaaagtctgaagcagtccgcatccgcgaatatggccatgatatttatatccgcggactgattgaatttaccaactactgccacaacgattgctattactgcggtatcaggaaaagcaatccaaacattctgcgttaccgcctgtctccgtctgagattctttcctgctgccacatcggttatgaactggggtttcgcacctttgtacttcagggtggtgaagataactggtttacaacaaaacggatggcagagattgttgcagagattcactcgcattttcctgattgtgctattacactgtccatcggtgaacgttcacgggaaagctatcaggctttgttcgatgcgggtgctgaccgttatctgctccgtcatgaaacatatgaccctgtccattaccgcaggcttcatcctgattcgctttctgccgttcacagacggaaatgcctttgggatctgaaggaaatcggttatcagatcgggacaggctttatggttggctctccatttcagaccgcagaaaatctggctgatgatcttctctttttgaaggaactcaatccacagatggtcgggatcggacctttcattcctcatcacgatacccgattttcccatgagccacccggaactctggagctgacgctctttcttttgggcctgatccggctgatgattccgaaagtactgctgcccgcaactacggctcttggaacgatttcaccccagggacgggaactgggaatccgggcaggagcaaatgtcgtaatgccgaatctttccccaacagaagtaagaaagaattatctcctgtacgacaacaagatctgtaccggtgaagaatctgctcagtgcaggggctgccttgaacagagaatggcatccatcggataccaggttgttgtgtccagaggagactcacgaaaccgatcaatttaactcagtatacttaaggaggcttttatgtacgatatcacttcatcctgtgcagatgatttcattaatcatgaagagattcttgatacacttgcctatgcagatcaaaataaagaaaatagtaccctgatcgattctattattcaaaaagcaaaaaaaagaaaaggattgtcacaccgggaagcctccgtgcttcttgcctgtccgatcccggaaaaaaatgaagagatcttccggcttgcagaacagatcaaaaaagatttctatggaaaccgaattgtgatgtttgcaccactttacctgtcaaattactgtatcaatggatgtacttactgcccttatcatgccaaaaataagcatatcgcaaggaaacagttatcgcaggaagaaatacggaaagaggtcattgccctccaggatatgggacataaacgtcttgccctggaagcaggcgaagacccagtccgtaataccatggactactatttagaatgtatccggaccatctacagtatccaccacagaaatggagcgatccgccgggtcaatatcaatattgcagcaacaactgtcgatcattaccgactgctcaaagaggcagggatcggaacttatattctctttcaggaaacctaccataaggaaagttacctgtcacttcatccgaccggaccaaagcatgactacaattatcacaccgaagccatggatcgggcaatgcagggtggaattgatgatgtcggcctcggagttttgttcgggcttgacaaatatcgctatgaatttgccggactgctcatgcatgcagaacatcttgaagccgcattcggagtcggcccgcataccctcagcgttccacggctcagacatgccgatgatattgatcctgaccagtttgacaatggaattgatgatgatacctttgccaagatcgttgcctgcatccgtattgcagttccctataccggaatgatcatttccacccgggagaatcagcagtcaagagaacgtgttcttcatcttggtatttctcagatcagcggcggatcacgtaccagcgtcggtggttactgcgaacctgaacctgaagatgaaaaatcggaacaatttgacgtcagcgacacccggacactggatgaagtcgtccgctggcttatggaaatggattatatccccagcttctgtactgcctgttaccgggaaggccgtaccggtgaccgcttcatgtcgctgtgtaaaagtggacagatccagaactgctgccacccaaatgccctgatgacactgaaagaatatctgacagactatgcctctcctgaaacggcagcaatcggaaaccggctgattgaaaaggaagtcctgaatgttccgaatgaaaaagcaagaaagatcgtgcttgaaaacctcagactgattgagcaggataaccggagagacttccggttctgagactgaagataacctgtaatacgattgattctcataaaaataagacagacagagaactgccttctcctttcgggtattccctgtctgtctcattttatcttatccttatatggatgttgggggcaaaagccccacaatcctacccgctattcgcatatcatggtgcttacgccctacttttatgctcatatcggggcgggtctcaaggtcattctaccaccagtgtgcaagcacacgtggtttcagaccttttgaccctgacatcttatatgttcttttctaaaaaatcaaatacttgatctctgccagtatctctcttagcacattattcggcagatacaatgctgtcgattctgcagcaattcctgacgggtcttccagtccctgccttttagcaatctgcaacgcacggaacatatgaaagttattcgtgacgatgccaactgattccttgctttttatgaactttttgctatattggatattttcagccgtcgtcgtcgacttctcctctttcaaaatccgttcttccgggatcccctgccggatcagatattttttcattccttctgcctcggaacaaggttcattgctgccttttccacctgatacaatacatttggtctgtggattttcatttaaatattccactgctttatccagccgaaaccttaaaactgcacttggaccacgctcatagatctgtgccccaagaacaatgatatagtccagtcccggtttcccttctgtgttcattttacttccgatgcagccaccaattcctgtaaaaagtaccaatatcagacataacaataccaatgtcactctccgcagaaactgtggcattattccccacaagccggcctgtgctgctgccgaacatcccacgaaaatgactgccagtgcaatccacacaagaaagaaaccggttcccgaaccaatcgcccggatcaggagtccatatccaccacaaagaaccgccagcaggatccaaaatatcgtaactattttcatcctttcaatcctctatttacctgacggcataaatttcaggatctcacctgctacattagagatcggcatcgtctgcagccagacccgccccggtcctgtcactactgtattgaaaacgccctctccaccctccagatagcagacaacaacaggaagtgtatcaccttttatttcgtatctcatacccaagacctcctcttttcttttcattttgagtgacatctgtcgaaaagtcaagtcttgcatatcagattgatctatttacatatttcctgcataatgatcatgaatatacgccatcatcagcttgatcttatcattatttttatttatagcgttgtctgttccaagctgatctttgcattgctcatacaattcaaaccagatttctgacaatgcattcctgagtcgcagttattttaaacttctgtctgcccggtctgtccctcgctcagcctgggcagcacgatctcagccttgaaaagatctgcctctgtcgtaatctgcaacgtaccatgctgcaattcaataaagctttttgcaatcgcaagtcccagtcctgatccttctgtatttcttgaagaatcgccacggacaaaccgatccgtaatctcattcacatcaaaatccagttcggttgctgatacatttttcatagaaatgctgactttatccggaaactctttcatttctatataaactctcgtctgtgccatggcatactttgtgatattcacgatcagattttcaaaaatgcggtaggtcttttcactgtccagccacataatcaccttatgatccggcaatttccagcggaactccagctttgcatcctggatcttagaatcattttccagctccacctgccggatcagccccaccagatcaacctgcatataattcatcttcacgctcttgcttgctgctttactgatctcaaataaatcctcgatcagcactttgagccggaaagatttccgctccagtacctcaatatactctttctgcttttccggatctgtctcatttttcagaagatctgtataagtgataatggcagtcagcggtgtccgcagatcatgtgaaacattcgtcaccagttccgtcttcatccgctcattttttacctcttcatccactgcctttttgaatccctgctggatcctgcacagctccttctgtatcggcatgaaaactcctgcatccccctcgatcaccacatcaagatttccttctgccagttcatttgtcgcatgaagcagcatctgatactttctctgtacatcccggaaaaactttctcaggatcaggaacagtacaatcgagtagatcaccagtgcataaaattcaaatccgcacatccagctgaccaattcaaccactacaagtataacaaaattcactataacaattcttaagattgctttattcgtcttatcacggaagtctatatgggtcagagcatcatactgctttcgtaccagctttttcagccttttcatgatcccttttaccaggctcacaaaatcttttcccatatgcaattcatgctgatttttccaccggatcagcatgccggtcagcgtctgctccttccagtatgctctctttctcgtaaatataccacaaagacacgcccctgcccagcagagaatcagaaaaataccgctccacatcgccaaattaattcctatctctgccatttgccggaatggtcctatcatatgcaccaatgtcccatcgactgtcctgcagagaatatttgccggatagtacagccagtcggcactcgatccaaaaatagcaatcagaatcaatatgactccttcaaatggtacgcggaaaatctttcctttatattcttctgtccttaaaagtgtcggaagaagtgccgcagccactgccagcaaaagcatcatgcagttgacagaacggctcagtccactataccatatgaccatatccccgcttctctgatcttcataaaaattttcagcataactctctacattcgcagccgacattccataaataagcgtcatactctgtccaccggataattcaatctcataagcatcttccataaaccgtacatcagctaaaaagctctgctctgcctcatattcttcttccggtgtcagcctgctgcctgacacttcaatatctgacagttccccatccgcatcataagtatatgccacccgaacaccataaacggaatccgaatccgacagaagccttgttgccacagaatccgacgtactctttaaaagactctctcctttccggtcaaatgccccgtactccatatattttttcagcagattaaactgcgacattccatattcttccaacagctccgactgctctcgctctccggatatttcattgcccagaatacagtttccgatcgcaagtccgttacccatatcagaaatgacattttccatagaatctgccttctctttctgagccttttctcctgcctcgtaaaacgatccataccgactgagcaatacggttgaacagatacagatcaggatcaccaggatcagatacttcagattatccctgcttttcaattttgtaaccaacgccccacaccacctttaaatatttcggattttttggatcaagttcaatcttctctctgatatttcttacgtgtaccataatcgtatccgtattgatcgctttttcctgccatacacgctcataaatttcctctgaagaaaaaactcttcccggattttttgcaagcaacagcagaattttgtactcgatcggtgtcagtctgaccggctctccgtccacagatacttccaccgtatcctcgttgatctccagacctccgatcacatggatattttccctcggtgcaagctgctccataaatttccggtatcttctgagctgggaattgaccctcgccatcagctccatcggtgtaaaaggtttcgtcacataatcatctgccccaatattcagtcccatcaccttatctacttcctctgactttgccgacaacataataaccgggaaatcatacttttcccttaatttcatcgtcatccgtattccgtccagtctcggcatcataatatccacgatcgccagatggatttcctctttttccagtactttcaacccctctataccatccgcagcctcgtacacttcatatccctgacttttcagatagatctttacgccttccctgatctctttatcgtcctctactaccagtacatgattcatttccattacttttccctcctgcatatccttatattagctgctaaatctaaaggtctcagatacaagtttccaaagattttctaaagaaaaaccggccttttcattcaaagaccggttcatttttatctatttacttcgcatcccactgtggctgctctctgaatgtgatctcacctgtcgccgcgtccattccgtcaacgatcgccagtgactctaactggaatccgagattacggatcatccttccacccgactggaaacctttctccactgcgatcccgattccctctacagtagcacctgccgactgcacgatctggatcagtccctgtaatgcacagccatttgcaagaaaatcatcaataagcagtacatgatcttccggagaaaggaacttctgtgccacgatcacatggttcttacacttatgagtaaacgactctacctctgccacatacatatcaccatctaaattgatgctctgggatttctttgcaaatacgaccggcacatcaaaatgctgagctgcgatacaggcaattccgatcccggatgcctcgatcgtcagaatcttgttgatctgcttatctgcaaatcttcttttaaactctgctcccatctcattcaacaggtgaatatccatctgatggttcaggaaactgtctactttcaggacatttccttcttttacaacaccgtcttttataattctctcttctaaaaagttcattcttctacttcctcctctgtatgatcttcaattcctgcaaaaattcttcttaataactttgagttgatccagaaaatgatcgaaactccaaataatgcccaaaatggaagagcaaatgtgatcaactggagattccatattgatataccgatcaacgctatcatgatggctaccatcagtatggaagacggaaatcttgccagtgtcagcgtcaatgcattacggatggttcccttgatactgttctcatatctcgcggtcagtgcaaatgcataaatcccgactgcaagtaccagcagttccagtgctgcaaagatcgctcttaacgccattcccacagaacctttggccgaactcgtcagatataaatccgcccccaggaaccccccgatcaccagcaggatcagccagatgatcgtactctttttaaaattctctttaaatgccttaaaaaagccttttacaatatatccttcctcattctttacaaccttcagcatcaccgtatacatcgctgtcgtagatgcaccgatcgtaaaaatcggaagagagcagacaagccaaagcacattcagacacatcatatcgaatattcttgacataccacttattaccgggttatccgtcacatcaagtctcatcgttcattgctcctttattttattctttatccaaaagtaaactcttttaagtatatcatatctacatttaagaatacaataagggaataataggaatataagaagaaacgcagatttaagagaatttttagaaaaataaaaaaagaagcgggtgatgggaatcgaacccacgtatccagcttggaaggctggtgttctaccattgaactacacccgcgtcatctctgacacgattgatatgatatcatattatttttatttttgcaagtattttttatactttttttattgctattttgaatcagaatgtatatcatgttacttatcggtagatccgacccaaaaaagcgttatttcaatatgacagaatggagtatattatgaatttttcacaattaggaaagtttcaggagttaaaaaagcatcttgatctttttcgttccaatcatcctaagtttcctcttttccttggggctgtaacccgcgaggctctcgaagaaggcacgcttctcgaaatgtccgtcaccactcccgaaggaaagcattttgagacgaacctcaaattaaaatcggaggatcttgaatttatccgtgcgatccagagtatgacaaagcagtagatcgcctggttgtctgttctctgctatgtgatcttttctcggtcttttcacctgttacagaaaatattccgaaagttttttgacttctcagcagacacgttatataatagtaagtgccgaacgaaaaaagaaaaggggataaaatcatgagcagaagaactgataaaaagaaattaaaaagaatgaatgaatccgcagtttcccaggcttcagtcacagttgcaactgtttccacggttaaggcagatgacgcagctactgctgcagagactacagcaccggtttcccagccgtctgcagcatatgatctttacatccagtatcagggagctgactacaatgctgaagagcttgcctcacagattcttgagaaatgcaaggcagaaggcatggacagtgctgatcttaagatctatgtaaaaccagaggataaaaaagcatattatgcatgtgcaggaggtaacagctacatcgagctgtaatccattctgcaacgtatcagagaggggatttattcaccgtaatgaatccattctttctttatcagcagaaaatccgcagagcgaaccttccaggtgcgtccctgcggattttttactgtatatcatttcagatatctttatctatgattccattgattctatgatacaccgttctttttacagatatcagccaggcagcaacgctcacaatgtggctttgttctcgctgtgcagacttcccttccatgccacaccagtctgtgacagaaatcacttccctcttccgctggaatgatcttccataatgccatctccacctttttaggttcttttatcccatctacaagaccgatccggttcacaagacggatacaatgggtatctgtgacgattgccggctttccaaatacatctcccatgatgagatttgcactctttctgcccacccccggaagctttaacaatgcatcaaaatcctccggcactttaccgccatactcatctcgcagcatcttcatacaggcactgatatcacgtgccttgctcttccccagtccacaggggcggacaatttcctctatatcctccaccgctgcatctgcaagagcggctacattcggatacttttcaaaaagtccttctacaactacattcacccttgcatcggtacattgtgcggcaagcctgacgctgaccagcaatttccatgcctcatcataatccagggtacaatccgcatccggatattcctttttcaatctctcgatcacttctaatgcccgctgcttcttcgtcatgactccaccctcccgtctgtctacttatctttttccgtatatttctttaattcctccagtacatctttaaatcttgaagatgctgctgtcgggtttctacgcaactgcttcattgctcctgcatgagtttcgtccgatctggataagatcttctgcagttcttttgccgcattttcttttaattctgccagctccaggcgaagcttttccggtacatctcctgctgctgtacgaagcttttcggagcggtcccctgctgctgtacgcaatcttcccggcatctcgcctgctgttgctgctgcactgcgaagcttttcaggcaccccttctgctgccgtacgaagtttttcggacatttcttctgacgcctctctgatccgctcctgcagcttccggatctgaactttcgtctcatccaactgggcaagcatcttcttcatatccattgcctcgttgaaagactgggtgaaatccaccgcagccacaaccgtaagaacaaatgcaagtccgtctgcgatcgccatcggaattttcagaatcacttcttcaatcggaatatgcacaactttcaccatcataatagagaaaacgccccaacacagagaagcaaccggacagatatatccctttacattgaatttcagatggctgtaatcccagtatctgacatggaacagggattccatgaccatccccgtaaaaaattccagcaatgtcgctcctatcatccccatgatgaataccagcggcagattatctctcaccggcaacgtaataatcagtacactgacagctcccgaaccatacagtgggagcattggaccatgcataaatccacggtttacccatcggtgtttccttagcgatacataacagctctcccagatccatccgaaaaaactgtataaaaagaaaaataaaagccattgagagagtgtgtatacattcatacccacaccttactcattccggttttcaatatccatcagcatatccactcttctctgatgacggccaccctcaaactctgtatcaagccatgtctccacaatcatcttagccagttctgcaccgacaacccttgcaccaaaggcaagaatattgcagttattatgagctctggacatcttggctgtaaacggctcactgcatacgaccgcacgaaccccttttactttgttcgcagccagtgaaataccaagacctgttccacagatcaggattcctctttcaacttctcctgatgcaactgcacgtcccactttctctccataaacgggataatcacagctctccggtgaatttgtcccataatctactacttcatgtcccttctctttcagaagttcaataatctctgctttcagttccagtgctgaatggtcatttccaattccgattttcattcctctattcctttctttttaaaaaattatgccgggcaaaagattcgtccagctatcatgcttaacgctcttatcatagcaaatatactccaaaaagtaaatgccgcacacctctgaattactcagcaggtatgcggcatttctattacccggatcatctccggtttatactttccgatccacttttatatcttttggatatttcagctctcgaaattcatattaaattcaaatcctcaattactggatctcgtaccagatgattccgttcggctccatctcaagatcgaaactgcttccatctccacgatagattgttgtactctgcggatcatctgtattatttactacgcagtatttgttattcttcggatatgcgtgtacatccacattgtagtttgtgctgaaccatttcttcagctcatcctcgctgtgagtactccacatgatcgcacgatgaagaacacggttgttctcaaagctgtacggaagtccgctgatatatacagcacgtcctttcccatattcattaacagccatctgaacttctttgtccttctgaacaaggattgtagatcctgcaagtgcatagatattcttcttgccctcaccgaaatcaacactctctgtctcttccagaatgaaatgctcatgctcatcccagttatatttatcataaccaagagtaaatccatgctcttcttcaactccaaatacatctgcaagctggaagaaacgtccctggaactgatgtcctgtcggctcacctacaccaatgataccaccgccgttgtaaacaaactttctgacagcctcaacgatgtgtggatttacccaccagtctccacctgtatgtgctgtatcagcatcacccacattgataagaacatcaatgtcatctaagatggagctgtcatccagaatatcctggaaactgatgaacttcacatcaaacggtgctcctgacagagactcgatgattcctgcataagaatagttctgcttctgatacagtgcatgatgtaccatgtggcatccccatgctctcatcttaccccagcagttaagaactgctaccttcttagcacagaaaggtgttgtgccttttacattatcatacagtgtacggaactcatcacatacctgtgatacataatcaataaaatccgggaagtcaagtgcaagctttaagtatccgccgtatccgattctgtcgattggctttcttaagatagctcttcttgctgttacccagttataacgtgcctcttttacaggatctccaccctcatggaatacatccgggaagaaatacggaagaagacgtccttctgtatattttactccgtcaatatcgctgatcagtcttaatgtagaaccatttcccacactacctacaactgcgtcaagtccaagtgtcttgaactcttccatgaacggctctgttccgatccagtgatctcccaggaacatcatggctttctttccacactcatgagtaatgtctaccatctcttttacgatcttggcaacttctcttctctggaatgcctggaaatcctgatactctttgctcggaatacggtactggttgttgtagtatccctgatcgataatatactcagcacggaacttgtatccgacttctttctcaaactgctctaagatatatgggcttacagaagctgaatatccataccagtctacatatttctctcttgcaagctcatcaaagatcagtgtgaactgatggaagaatgtggtaaaacgaagtacgtttacatacggatgatcctcaataaactttctaagacgcttcattgtatattcatgcgtctttggctgacgtacatcaaatgtgatctgatgctcaacatctttccagtcatttgtaactgcattgtacatatgcaccggatcccacataatataagcaaggaaacttactgtatactcatggaacggaacagcagcaagtgtaacctttcctgtctcttcactgtagtcccatttatctgtcggaacaacttctcctgttgttctgtcgattacttcccaccaacgtttgatatcatctcttgtattcggtttcagcatatccgggtaaagtcccttcattacttccacttcaagagtttcagactctgctgtatagaaaggtgtcataacatacatctgctgaatttcttccggattggcttcagcccatgcattatctttacgagttgtataatatgttgaataaatttctgcatctgcatctttcagctctgtagggaaatctgttccatcgcaatcacggattgcatcagcaccccaaagcttcattaattccagtgtctgtggcactacgtccaggtcagtaggaattgtaacgagtccttttgatttctccattgaattatcctcttctattctttaaatactctgatttttagtttatataaggaaatctgccatcggcagatttccttatgctttcttatcacaggtatccttcctgcaatgtagacaattatttatatttgctgttgtaaaatgccagcagtccgaccaaacctgcaagacctacgatctcagtaagaagaccctttggtccgatatttctctgtccgacaatgataaggccgatacaaacaacgaaaatcacgataacaacaatcgcagtgataatctttttagttctttcattcattgtaaatacctccttaacctttcaatccacccagagtcattccctgagtaagtgtcttctgtacacacatatacagaatcagaacaggaagcataacgataaccagtcctgcgtacatctgaccatactgaactgctgatttctgagcagccatcaggttcataagacctaccggcagagtcttcaacttggcatctgtcagcaatgtcatggaaattacatactcattccagaatgacaggaagttgaaaagaatgatcgttacgatacttggttttgccatcgggaagatgatcttaaccattgtcgtaaagtatcctgcaccatccacataagctgcttcctcgaagtcttttgcaagaccactgaagtatcctgacagcaggtagattgtgaacggaagtgccgttgccatatatacaaccgccaatatgaacaagttatttaggaagaagcctcttccgatcatctgtctgagtgacttgtcccagttgttcaacataaggaagatcggtactacgatgtaacttacgttgatgaaaagtcctgccatgaagagcagattccagaacttacatgtacggaacttaaatcttgacagtacataagctgccggaagtgcaactgcgatcagcattgcaatcgcaagtgctgtaacaatcacagagttcaggatgtaagatcccatgtctgctttcgtccaggcatctacaaagttctgaaaataaagtttctcaggaagtgtccacggatttccgtagaattccttattctgctttaccgatgcaaggaagacccatgctaccggcacgatgattgtaattgcaagaagaatcaggcaaatatacacaatcagtttactaaagccaaacggtttttttgatgtattcttttccattccgattcccctttccttaaatttctacttcctgacgttttgttgcaacgttcagcagtccggcaagtgcaaaggagaacaggaatactgatacaccgattgccataccatatccatatgaagagtttgtataagcctcctggtacatatagctcaggaatacgctggaagctccgtccggtccaccactcgtcattgctgtaacgagaaggaaactcatgttgatcgtactgattacgaagaatgtaagtgttgttctgatgtttgtccagatcaacggaatcgtaattgtaaagaactgataaatcttacctgctccttcaaggctggcagattcgtacagactctctgatacgttcgccatacttgccatatacattaccatgtaatatccaatggcctgccataccatggcgatcacaatactgtaaataactaccttctgatcaccaagccagaggatctgatcatcactgtgcttgaagattccgatgatggaattcagaagtcctgtatttggtttgtagatagcagagaagatagcactgataactacgattgaaaggatattcgggatatagaagattactctgaagaatccctgtcctttgattttttctcttgaaagtatgtatgcaaacactaacgcaaatgcaaatgtaatgatcgtaactaatacaatcagaagaatctggttctggaacgcctgatagaacttctgattctgtaacaacgatttaaagttgctcagtcctacaaatgtcttgttatctgtatatccgccccatttatataaggaaatacggaagatttcgatcgtaggaacaatcataaataagataaataatattgctgccggggccaggcaacagaatacaaacagccccttgccttttctttctttcattggttcatctccaattctataaatccgtttcattgaataaccgccgccatccaacggctattcataccgtcatagcagatatcggcattaaaacaggcggtgaagagatttcaccgcctgcctcacctgtgagattccttccaaatcattttatagttgtaaggaaattcccggtaacttattcagattattttaaagcagcacgaagtttgtcgctatctgtcttaatctgatttacccagtcgtcttctgtcttgtcaccagttacaagagagttaaccggatcaaagaatgttgtacgaactgttacaccttctactggatctgttgtagcgaatgcatccataacagctacagcacctgtatcatagattgagtagtacagtttgttgtctccgtcaagcttgtcagacattccttcgattggctggattgctccagatttagcgaagatctctgctgctgcatcagagtacatataagcgataaattcttttccaagatctttgttctcagcacctgatggcatccagatctgctcgaagaatgtataggaagctctctctccgtctttctctactgccggaagagctgtgaatccccactcgaatccgtctgctctcggagcgtctgccatctcaccgattacccagttaccatttggcatgaacagagctttgtcatcaagaacaagctgctggttgttacggaagtcattgtcgttagcatttgctgttgttgtaggctcaacgtgagaagcaagctgtgtaacgatatcgaatgccttcttagctccgtctgtatcccagattccttcactatagttcagagcctttgtgaagtcttctgatcccattgtctcatgcagtaatgcatagaagaatgcatcaaagtatcctgttgtaggatatgtgaagagtgagattccttcagcttttgccttgtcagcaagtgcccacatgtcatcccatgtctccggtacatcccatccttttgtcttgaacaggtttgcatcgtagaacagtccacatggtgagtagaacattggcatcaggtatgtctttccgtctccgtaaggattaacgatggagttctctgtgaatcctggaaggatcttgtctccaaccttagcgtcctcacccggtacagtcatatcaagaacgtctgtaagttcctctacgttgttgtccttgatgaatgtctctgtgatagctgactcagaaccaacagctctcatgattacgtccggatactctccagatttcatctgtggctgaatgatatcctcgatgttcttgtcgattgtaagctcaaccttaacacctgtctctttctcgaatgcagccgcaacatcgttccacatatctgcaccgtatgctgtctcaactactgcaacctttactaccttatcactgtctgaatttccttcagatttcttgtctccaccattggatccacatgctgcaagtccgaaaaccatagtacctgcaagcacaaggctgataagttttttctttttcatttaaatagttcctccttataactttttccagttttacttggtatgtctatcatatactatttctccctctttttcaacctttctttttgcctttttttttataaatcttgctttttggactatttcccaatatcaccatatcttatgacccccaaaaatgttttttcatattcttttgttattttttcacacactgacataaaaaatgttccttttttttgctaaactctcccgaatcctgttgaatcaacctctaaatttctttataatatttgtataaccagttgaaatcgttttcaagacaatatttctaaattttgtggaggacacctatgggtaatatacgacatacttttacttcccccttaaggcatgaccacacctgtcatcttctgtattctacctattcaaaatatgaagaggactggagcagttatccgcacacacattattttacagaacttttttttgtgctgtcaggaagtggcagttttctcgttgaagacgaaacctttccgatcgcaaagcacgatctgatcgtgatcaacccgaatatcacccacaccgaaaaatccagcctcgaagacccgctggaatatattgtactgggtgtggatggtctgaattttgtcattgacgatgcaaatgaatatcttctgttccattccgatgaaatgaaagaccggcttgatttctatttccgtacgatcctggaagagacagagaactcgcagaaagattacgaaaaggtctgccagaatctgctgaacatcctggtcgtccatctttcccgctacgcttcctcttctgtagagatttttccgttccataagatggaatcccgcgaatgcagccgggcaaagcgttatattgattcttctttctaggaaaatattacattggataaacttgcagagattgcacagatcaacaagtattatttttctcatactttcacagaaacctatgggatctctccgatgaattatctgacccagaagcggatctttaccagtcaggaactgctgacttccaccgatatgagtcttgcacagattgcacagcaatgtggattttcttcctccagttactttacgcagtgtttccgtaaatcctgtggtatgacaccgactgcctaccgcaagcagtttctgcgaaaccagtgatccgaaaatttctcagacgaaaaaggagtaccgcacatcgcgatactccttttcttttacagaaaattcttaaattttcctttttcatcttacctttcggaaagaatctttatcttcttttacgtctgcgtgtcacaactgtaacaacagcacctgctgccagcattgccatagctccccacagaatcagcggagtagcatctccggtctttgctgctttgtcggatgaagttgttccggcattggttcctgatgtagaacctgcggtattatttcctgtattgttgccagtatttgtaccgttgttgtcacccttgttgtcgtcacccttattatcgtcgcccttgttgtcatcgcccttattgctgtcgtcacctttgatctttgtaacgatcacatccacgctgacttcaagaccatccggattttcaaactcatcaccaagaacaagttctcctgtcaatgtataagttcccggaacatctgacttgtaagcactcagatcccagtcaacatcaaccgttgcggttgttccatccttaagttctacttcaacctgtcccggaagtccgagattggttgcaagagttccttcttttacagaaatatcatccagttttgcatttacaatggatttaatttctttcttcgtttccggcttcggctcttctgccttcttcgcaactgtcacttttacagaagctgtcaggttcttcggatttgtaatattatctgcaaaggaaagggttccttccagtgtataatcacctgccgtatttccatcatagctgtctgtattccacgtaacacttgctgttccggttgttccgtctgtataggttacttctacctctgttggaagattcagttctgatacagccgttccgtatgcaacttttttcttatccagttttgcaacagacttgatctcatactgcttcttcgtaactgttacctggatagaagctttcacgccatccgggttctccatgttctcacccattgtcagggttccttccagtgtgtaagttcccggtgttgtctgataatcacctttcgcccatgttacggctactttttcattcagatttcctgtcactgtgacagttactttctccggtaattcaagatccttaaatgcagttccttcttctacagaaattcctgccggatttgttacgctgagtacattctttgttgtctcaccaccaccgttattctcaatcgtaaatgagaactgtttcggaagtactgactttcctgctgctgtctttgcaacgatcttaacaacatagataccgtcatccagatcgctgagcgtgaactctgtcttggttgtattgcctttcagctcgccgtttacataaacgtcatagcttgcgaaggaagaaccttcttttaatgcccatgtgagttttacagaatcatcactgactgctgtttttgtaatggactcgatctcacctgctgctgttccgtcagcaatcgttgttacattgccgatctcgatggccttcgctgatgcctcacctgcattgctcagggcatataccttgaagttgtaggttgttcccggtgtcaggttttccagtgttgcggttgtgccgcttactgtcatgtcgattccgttctctgtatcagctactcgatactgtgctgctcctgaaaccttgtcccatctcagcacaacctttgtgctttcaacaagaactgcagaacctgtctggtcttctactacaggaactgccggtgtgccaagtgctgtgattgccgcatccagtgctgctttctttgcattcacatcatcctgtgttgcatccgcatcattcattgcctcaactgctgcatcataagccgttttaaatgcattccattttgtcgcatcatatgctgacttagtaagtgccgcacctgtctcaatcgatgtctggagtgctgacttatcagccgttacaccttcacccggtgaaaggatcttcaggtaatccaggttgacctgatattttccatcacgtgcaactgctacacacttgatcgtatgctcaccatttgtaagatccgtcttggagaagatcagttgctgattatctccgctgcttgaaccattcagtgaataattaccgatctttacgttatcaacgtagatatcaaagcttgcaaagttggcatgcttctgagaataaacctctacacctgttccattgaacgtgtattcaaaatagcttcccgccgcacttgaatcatttccggtttctgtctttgttccgccatgatgctttgtctgttctcctgcccagttagaccatgctccattccaggtgatcgcactgttctttgttcccgctgttccggatgccggtacggtaccgtcttctacgattgtctcgacatctgccacatcctcttttattgcaactttcagttcaatcgttccgctctttgtagcatctgcactggaagttgctgtgatcgtaacggttccgttcttacttaagaatgttaccagtccgttcgcatctactgttgcgatactgtcatcggaggtactccatgtaactgtcttgtctgttgcatcatccggtgctacagtcgcttttaactgtaacgtactgtttgctttggatactgtagtcattccggatttggaacttacttccacacctgtcggtgctaccagtgttgaatccaggatttcaaatgcatccagctcgatctttgtattggaacttgctgtctgcttctcattgaggactttcaactggatcgtatggattcctgctgtaaggtcttctttgctgaagtattctttctgacgtactgtgcttgcactgtatgtatcaacaatgccctgtgactcaccgtcaatcaatacttcgatcttgcctctatccttattcgtacaaccgatcaccttgattcctgttcccttaaatgtaagagtcgcagtctcgccgccattcggattctgcagatactcgatcgtatccatatagtttacattcttgtcctgtgtccaattgccccagtcacctacatatgcgattctttcatccgcattatcaatcttgccggctccaaccggttcaaccgcagtcactgctgcactcttttcagattcatttccttctacaaccgcagatatctgatacttcattgttccaagcgtcttgtctgctgttgtatctgtataagttgttgttgtcaggcctgtctcaatgcagatcacatcaccatttgctacctgacgatatacattgtatgttacgttgtttccctcttctgcggttacggcatcccaggaaagttctacattctcagcgtctgcacggagtgctgtcagtcctgttgggactgctacctcagcggatgccgggatatcttttaatgtatagctctttccggcttctgttgcgaaagagatccggttttcttttacaggtgtcacatcgactacctttccgtcgctgtctaccacggttgcaagagatgcattctttgtctgtactactgcttctccgccattcttggaaaggatcgtagcggttgttacatttccgtctgtccagtccatggatacttcaaagttgccctgtgcaaccagtccgtttacacttccgtctgcccagtcatccggaactgccggaagaaggttgatgtatcctgcattgctctgcagaagcatctcagctacaccggatgtataaccgaagttaccatcgatctggaaatatttcggctgatgataatcgaacaggttcgcatagattccaccgttgaacaggttcttgatgatctgataagccttatttccatcacccagtcttgcccagctgttgattctctgtgccattccccatccggtactttcatctgtacggttctgcatcgatacctttgctgctgcaaaccattctgcatgatcctctgtaatgaggtctcccgggaaaagtccgagaagatgggacatatgacggtggttatatccttcaccgagtgtacttccacttgcattatggttaaaggttgtctctgtataccattctttgatctgtccgctgtcgccgacctcgatcggtcctttcagatctgcctggtttgctttccatgtagctaccagttcttcatctgttccgaggatctccgctgctttgatcgtatcctcgtataactgccagatcagtgtctgctcataagtgttgccgcttgtaaccggtccatgctccggtgaatatgccggtgaagataccagctttccatcactgtcacggacaagcatctgatcatacagcttggcctcttccttcattatcggatagatattgtctcttaaataagatgtatctccagtgtactcatagtaagaccagcagttctgtaagatccacggtactgctgccggtgaccatccccagctgaaactccatccaggacaggtccatccgaacgggttgttctgcgtatgtgccatgaatccattttcctcaccatcggcactggaaactcctgcatagatcgctgcggtcacacgccccggttctctgagggcatccacataatcaaccagtggttcagcacactctgccatgttcgttgagtatgtcggccagtagttcatctgtaagtttacattcatatggtaatccgaatgccatggagagttgttcgctccgacccacagtccctgaaggttggaaggaagtgtctctctgacataaccatttccatctgtccttgtctctctggaagactcgatggtcataaatcttccatactggaacagcatgacttccagctgacgtctttcagcttctgatgcagttcctgccttatatgcagaaagaagtgcatctgttgtctttgttgaaacggtctgtcccagatccaggtcgacacggttgaagatattctgataatcacttacatgatctgctttcagttcttcataggtcttaacctctgcctgatccacataccattttacacggtttgtcagctcatctgccgtctcacctgttctgtagctcggatattcatccttataatctgttcccatggaagtgatgatcgtaacctcacttgcaccggaaacacttacctttccatccccatctgtcactgtaccgccattgtcggtaataacctgggtctgggatgaaaatttcatctggttgtctgtgagctgtccgttgacggagatccgtccacctgacacggttgtatcccatgttctcttatagccgttctctccgatggaattggcagctcctccgcttgtattatccggttctacactcacatccaggctgatcttttcagatccgtctgctgtgatatgagtcacgatgacattgtccggataacttgtgaagttctctcttgaataatgcgtacttcccttgtcatagtttacccctgcgatggctgtattcagatccaggtcgcggctgtaattgcttacatcactgttggatgatacatttttgaaatcgatatacatatttccccagctaaggtaatatccatatccgtttgttcctgcatcatcacttaaaccaacaaggttgctgttggcaagactgatcgcggagctgtcctgtccgtttgcgaaataattgtggatctgagtcatggtagatccgttattccccttattctccaggttacctccattgtagttcggtctgctggtgcttggtcctcctgaccaaagcgatttgtcgttgagctggatacgttctctggtgattccgccgaataccgttccaccaatcccgccattaccgatcggaagcgacttttcctgccagccttcgtaatacttggtaatgtctgccggacttgtataccacagcttcagatcattgtcaccagtctgctgcgttgcagcgaccggttccgcattgacctgcgttgccatatacggcagagacgtcacagccattgctgctgcacaggcacttgcaagtacccgccatttcatttttcttctcataatacccctttctgatgtatcttaatttattgtcgtgaaattcctctgccttcgattcctatgggcagactcctcccaatgtccaattatctacattataaaacttttcttttgaatgtgcttgtttaatttactctttataatcgcttattttgtcaaattcagaacctctgaatttacattttatttatattttttaaaaaaatagggtcaatcatttttcttatgggtttagccccaaatgttttaggttatcgccatcctgccgccatccttgacaggtcaaaaaataaatgctgtgggttaatcaccgacggcgaagaactcaagaacaatcagttatgtttctccgtcgatacaacagtg

SEQ ID NO: 34 - DNA, 165006 bp, Mediterraneibacter lactaris
  misc_feature (557)..(557): n is a, c, g, or t
tgtggcaaatcataaagactatttccaaaagctggatctggagacttatcatgcacttggagcattcttaaattcccggcagcttatggagataaacgtagaaaagaacgaaagggaggaactggatatgtgtaaagcactggaagatatttataacgatggcgttcaagcaggcatggaggttggaatagagcagggcagacaatcagggattgccgaaggagaaacagctcttaagaaggatgtcgcctttcaaatgcaaaagcttgggtattctttagatgcgatcgcagcagtactgagagaatcggttgatggaatcagtaggatactggctgtagttggataaatttgtagttattggggtgatacgcttgtaaagcaaaagacttctttatggcgaagaggacgcggaaatcagagatattccttcgcggtgcaggcccgctttacctcagcccgttgaccgtttgtaactcgaaagtggaaatcttcgtgcaatggcactcgatttactttctctaacaaacgctgcaaagtgtcttcggaacgctccngtgcaggcccgctttacctcagcccgttgaccgtttgtaactcgaaagtggaaatcttcgtgcaatggcactcgatttactttctctaacaaacgctgcaaagtgtcttcggaacgctccctgctaatgcacctgctcaggaacaccctgctttccgctgaccatctcaataagaagtttttagctccacagcgtattcactcaacaatgcaattttcaaaaggatagaaaaagccggatggctattgactaagatattcgatcgtaaatattagacagtagatattgtatttactagatgccagggtcaaaaggtctaagcccacatgagcttgctcataggtgggtgaaagaccttaggacccgccccgatatgagcatcaaagtcgggggcttttgaccccgacatctttactatttgactaatcattcatcttagttgatagccatccggctctttatttcttattgaaatttcgtctttgttgggagaaaatgttccggtgcgaggaaagcattttgacttgacaagtctaatatccgcccttgctgttgcgtgagcagtgcattgacagggagcgttccgaagacactttgcccaacttgttaaggaacgtaaacaggagtgcctctgcacgagtgtttccacgttcctgttacaagttgtcaacgggctgaggtaaagcgggtcctgcactgcgatgcaacagcaagtgtggatatggacgtttttctgtcaaaagactttctgctcctgggatattttctcttcaacaaatacaaatttagttctctttctccaaattcttaaacgctgttgacagcatcagtttgattctgttcaactggtttacttcacttgcacccggatcgaagtcaatagctacgatattggactccggatgtctgcggcggagttctttgataacgcccttgccgactacgtggtttggcaggcaggcgaatggctgcgtacaaacgatatttcctgcaccgctgtggatcagctccagcatttctccggttaagaaccagccctcaccggtctgatttccgagtgatacgatctcagaagccatttttccaagatcttcaatatgtgccggaggatcaaaatgcttactctgctcaaatgcctttgaagcaggggaacggaaccattccagtgccttaatgccaagattaccgaccgttgcttttgatttcttcatgccaagatgtgacaccttgaaattctgattataaaagcagtaaagcaggaagtccagcagatcaggaacgacagcttctgcaccttcgctttcaagcagttcagcaagatggttgttggcagccggcagaaatttaacgagaatttctcctacgattccgacgcgtggctttttgatatccagcgtttcaatggtatcaaaatcatgaatgatctcgttgcagagttttttgaatttccggcgggaaggataaccttccgatacgaatttcttcacgacctctgcccatttccggtgaacctggtctgtcgtgccgggaacggcctcgtatggacgcatccggtaaacgcatttcatgaaaatatctccaaatacagcagcatacaatccacgcagaaccagtgccggagatagcttgaaaccaggattctcctccagtccgcttaagttgatggagatgactgggatgtgtcccatgccggcttttttcaaagcacgacggataaatccaatgtagttggaggcacggcatccgccaccggtctgactgatgataacggctgtctggttcaggtcatattttcctgaaagcagggcatccatgatctgtccgactacgatcagagatggataacaggcatcattatttacatatttcagtcccatgtcgactgcctgtttgttgtcattcggaagtacttcaatcttatatcctgctgcacggaatgcaggctcaagaagctcaaagtgaaccggtgacatctgtgggcagaggatggtataagtcttccgcatttcttttgtaaacggtactttttcaatagaagatggacggatcgttctctgttcctgctttttctcacgtacacggatcgcagcaaggagagagcggacacggattcttgcagctcccaggttattgacttcgtcaattttcagtgttgtataaatcttatctgaattggtcaggatctcagcaacctgatctgtcgttacggcatccagaccacagccgaaggaatttagctggatcagatccagattctcagtagtcttcacgtaatttgcggctgcataaagtctggaatggtacatccactgatccatgacattcagagggcgttctacctgatgaagatgggagacggagtcctctgtcagtactgcaatattgtaggaggtgatcagttcagggagtccatggttgacttcagggtcaatatgataaggacgtcccgccagaacgataccacggttgccggtctcattcaggaaacgaatcgtctcctctcctttcgttctcatatcctgacggcaggctgcaagttcctcccatgctttatgtacagcagaacggatctctgtatcagaaagagaaaatttctttccgagttcgtcaatcagacggtaagagattgtatcctcactttcaaagttcaggaacggatggataaaatcaacttctccatgcacgatcggatccatattgttcttaatattttccgggtaggaagtaacgatcgggcagttataatggttgtccgaatcagcaaattctttcctctcataagggatggaaggatagaaaatgtgctttactccctggttgatgagccactgcacatgtccgtgtgcaagcttggccggataacattcggattcactcgggatggattcgattccaagctcgtaaatctttctcgtagatgccggagaaagaacgacacggaatcccagttcagtgaaaaatgtaaaccagaacggataattttcatacatattcagaacacgcgggataccgatcactccgcggcgggcatcggcctcttcgagaggagtataatcaaagtaacgatgcagcttatattcaaaaaggttcggcatctgattctttgacttctcttttccaagacctctctcacagcggtttccggtgataaatttacggccgccgctgaaatggttgatcgtcaggcggcaggtattggtacatccacgacatttggtcatagttgtagaatattccagggaacggatctcatcgatggagagcatggtggttccctcgcagtcagtataacgttctcttgcgatcagggcagcgccgaacgctcccatgattcctgcaatgtcaggacggatcgcctcgcagttggcaattttctcaaagctcctgagaaccgcattattatagaaagtaccaccctgtacaacgatatgcttaccaagctcagaagcatcagaaactttgattaccttgaataaagcattcttgataacggagtaggcaagtccggcagaaatatcagcaacagaggctccttctttctgagcctgctttactttggaattcataaatacagtacagcgtgtaccgagatcgatcggattctgggcatacagtgcctcctgagcaaaatcttccacagagtagttcagggatttggcgaaagtttcaatgaaagaaccgcagccggaagagcaggcctcgttgagctggacactgtctacagtctggttcttgatcttgatacatttcatgtcctgtccaccgatgtcaaggatacaatctacatccggttcaaagaaagaagctgcataataatgggatactgtttccacctctccctcatccagcatcagtgcggatttgatcagtgcctcaccgtaaccggtagagcaggagtggacaatctccacaccttccggcaactggtcataaatatccttgatggcagaaatggttgtgccaagtggatctccttcattattatgataaaaagaatgcaaaagagtaccgtcttctccgaccagggcagcttttgtggtggtagaacctgcatcgattccaaggaatgcctttcctctgtaggttgcaagatcttttaccggaacctgatgctgtgcatggcgtgcggaaaattcttcatagtctttcgtggttgcaaagagaggatcaagacgttccacttcaaattccatcttgatctttccttcaagacgcttctgcatttcaagaagagccatcggagtatcctttttggaattgagagcagaaccgatcgcagcaaataaatgagaatggttcggtgcaataatatgctcgtcatccagtttcagtgtacggatgaaagcttctttcagttctgaaaggaaatgaagcggtccgcccaggaaagcgacatgtccacggatcggttttccgcaggcaagtccgctgatcgtctggttgacaaccgcctggaaaatggatgcagcaaggtcttctctggcagcaccatcgttgatcagcggctggatatccgtctttgcaaatacaccacagcgtgcagcaatcgaataaagagccttataatttttagcatattcattcagaccggatgcatcggtctggaggagagatgccatctggtcgataaaggaacctgtaccaccggcacagacaccattcatacgctgctcgacatttccgccttcaaaatagatgatcttggcatcctcgccgccaagctcgatcgcaacatcagtctgtggagcgtaatcctgcagagctgtagatacagcaatgacctcctgcacaaaaggtacgccaagatgtttggcaagtgtcagtccgccacttcctgtgataacaggagagacctgaatcggtccgagtttgtaaatggcacgtccgagaagatctgacagagtttcctgaatattggcaaagtgacgctcataatcagagaaaagcacttcgttctcgttgtcaagaatggcaatcttaacggtcgtggaaccaatatcgattcccaaagtatagagttcttttgaattcatgttactatccccaatctttcgtaatggtctatgatatatgtatgagttacttcttattaaatgcgtttacagattcgcaatacataacattatacgacatccgaagggaaaagacaattgtaattgttgttcatgattctgaaatattcataaagaacttgttaaatcttaaggaaaataataacattggtttgacaaaataaagcccggacggtacaatgactgatgtatggtagaagaacaattttggtaaaaaaaggagttaatgtattgaactggcttgacaaattagaaagaaaattcggacgttatgcgattccaaacctgacggtttatctgttggcaggatatgtcatcgggtttgcggtttattatcttgcaccgaatctgcttagatatcttacactggaaccgtattatatcctgcacgggcagatctggaggattatttcatgggtactgattccaccgacgggaagtctcttttcgcttttctttttagtacttttgtactattcactggggacagccctggagcggacatgggggacattccggtataatgtctatattttttccggtattttctttactgtgatcgctgtatttattttatacggagtattttatcttatttatggagttgcacttccgatgtccagcatcggactgatcagcacgaattatattacgatgtcgatcttcctggcattcgcttcaatttatcctgatatggaagtgatgctttactttattctgccgattaagatgaagtggatggcacttgtctatgcagcaatggcactgtattatttcttcacaggaagccttgcagtaaaagttgcgatcggagcttctttacttaattttgtgatctttttctgctccagcagaaatataaaaagatttggaccgaaggaacaggcacgtaaggcaaagttccggcagcagtccagaccgcatatgacttattctaatggggcaagacaccgttgtgcagtatgtggaaggacagaactggatgatccgaaccttgagttccggttctgctccaagtgtaatggaaattatgaatattgtcaggatcatctttttacgcatgagcatgtaaagtaagaaaccgacagaagagatggagctgaaatctgagctgttgtcagaaccggctccatgaagatgatacagaatctgatacaaataaaagagtaatttaattatgaaaaggagagagagtttctatgaaaaagacgaaagtagtatgtacgatgggacccaatacgaatgataaagaactgatgagaaagctgatccggaatggaatggatgtggcacgtttcaatttttcccacggagatcatgcagagcagaaaagccgtatggatcttctgaaggagcttcgtgaggaggagcattctaatgttgcgatcctgctggataccaaaggaccggagatccgtaccggactgctgaaggacggaaagaagatcatgctggaggccggaaagaaatttacgcttacgacagaagaggtggcaggagatgagaatatcgtatctatttcttatccgggactgatcaatgatgtgagcaggggaaagacaatcctgatcgatgacggactgatcggactgaaagtagtcgagaagaaagaaaaagaactgatctgtgagattatcaacggtggagagcttggtgagagaaaaggtgtgaatgtgccgaatgtaccgatccgtcttccggcgatcacagagaaggataaagaagatatcaagtttggtgcagagcagggaattgattttatcgcagcatcctttgtgagaaatgcagagtgtatcctggagatcagggcttatctgaagtctctcggagcaccgttcattccgatcattgcaaaagttgaaaattcagagggaattgacaatattgatgaaattatccgtgcagcagacggtgttatggttgcccgtggagatctcggtgtggagattccggcagaggaagttccatatttgcagaagatgatcattcagaagtgtaacagtcactttaagacagttattacagcaacccagatgctggattccatgatgcggaatccacgtcctacaagagccgaggtaacagacgttgccaatgctgtttatgacggaacagatgcagtgatgctttccggtgagactgcacagggcaagtacccggtggaggcacttcagatgatggttcatatcattgaaaatacagagcagcacttagattacgaggagatgcttgagaaggagtatggtcatttaaagagcggtgtatccagtgccattggatattcctccgtacttgctgctgcaaatctgaatgcaaagtgtattctgacgccaactgtttcgggtgcaactgcaagggtggtttccaatttaagaccgagacaggagattcttggaatcacaccgaacgaaagaactttaagaagaatgtccatatactggggagtcagaccgctgaagtctctggagcatgacaatacggaggatatctgcgagaatgctatggagcttgcaaaagtaaagcagtatgtagagaagggggatgtagttgtcctgacggcaggaatcccttctccgaatgtaggaaaagaaagaagttatacaagcaatatgatgcgaattgctacgatcgactgatctcgggaagacaatgatagaatgaaacccttacagttcttcaataaaaagaagagctgtaagggtttttgtctgctacataggttcttagttcccctgtgccggatactctacaagatccagcacagagttatggatcagataatcataaacttcagccagttcttttggttcataatcgacatcatgagtcacggcatatttgatagaatcagccagcccgaaggtataaaatcttgcaagactctctttggtcagaatcttcagacgggaaggagctttcaaaggatatttgttgaacagggaaaagatcagttcataaataaactggaacatctgctcttcaaaagaatttggaccttcgatcaggtacagctttttataaaatgcccggtctttagaaagacaggaacagagaagcagaaaaatatcattttccaggtgattttcaatgagtacgtcgattttttccctgatctctttttggagaatatattcaagaatcccgtatttatcctgaaaatgcttataaaaagtaggacgtatgacaccggcaccgtcagtgatcattttgatcgttatcttatcaaatggagtcttaaggatcagttctctgaaagatagagtcagcaaatctttggtaagttcttttttatcttccatatgtcttccctttcctttccgtaagtctgctttgcagattataccataaaacttaaaaggaagaaagttcaaaggatacaaaatttcaaaaatgtagcctgtccaatacaaatctcaaaaaatgtctgatcagagatacagtttaaaaaagctgattcttaatgaactaaaaaaaatagagtagaataactggaaaaggaggaaattgcaaaaggcatagctgaaaggagaagattatgtcatggattgaaattattttaatcggtgcaggtctttcgctggatgtttttgcatatgtattatgcagaggtgctgtagttggtgaagttgacaaaaaaagtctggtgattctgggaggcgggttcacgctctggaatctgatcagcctgacggctggaaattttgtggcaaagataccggttgtttcaaaaaatgcagagtatgcggccaatgactggaaatatatatcggttgcgatttttcttggactgggcatttatctcatcgtcaaagcggcaagaggaaaagaaatagaagagcgaaaggcagaaagactggaatcgaggcagtttgcaatgtggatggcaattaccagccttgatgtatttatagcaggaattggatttggattcctggatacagttttttttaagacgtttatagtgattcttctgatcactccggtcagtgtgattgccggactatatgccggatggtgggcagggtgtcaggcaagaaagaaaattgtggcagttggtggctgtctgcttctgatcggaggaattgaacttctgatccggctgatgtaagaggcaggaaggacaactataagaaatcaggatactataagaaagctggtatatgctgataaaatagaaggttaaattgagaaaaaaagacgaaagaaaggaccgggaacttccggagaaaaggtgaaaaaaatggcaggtttaaaatttcaggcacagagagcagcattcagcgtggcagcagatgcagttttaaagtatgtaaataagaatgacgacagaacaaaagcacttctgaaggttgtagatctgacggaaagtttcgcaaaagaccggtttaaaccggagtcatatgaagcagcaagaaaaatgatccaggatcctgaaaataagtggatgcagtatctgaaccgtttatttgatgaggtaagcccgaatgtattaaagacgacagcactgaaccttggatttgatgcaatgctttatggaaccaaagtgatgcatgaggcaagagaaaaatatcagtgtaatgtaccgtggctgatcctgatggatccgacgagtgcctgtaatctgaaatgcaccggatgctgggcagcagaatacggacatttgctgaatctgtcttttgaagatatggatcgtgtgatcacgcagggaaaagagcttggtatttatctgtatatgcttaccggcggagaaccgcttgtgagaaaaaaagatattatccggttatgtgagaagcacaatgactgcgaattccatgcatttacgaatggaacgcttgtagatgaagaattttgtaatgagatggaacgggtaggaaatctgactctttccatcagtctggaaggatatgagaaagttaatgatggtcgtcgtggaaaaggtgtctatgaaaaagtcatgcatgcgatggatcttctgaaagctcatggacagatttttggaacatcgatctgctatacaagagccaatattgagacggttacatccgatgaatttctagatatgatcattgaaaaaggatgccgttatgcatggtatttccattatatgccggttggaaatgatgcggcagtagatctgcttccgacaaaagagcagagagagtatatgtatcatcgagtaagagaaatccgtggctttaccggtggaaaacagatttttgcatttgatttccagaacgacggagaatatgttggaggatgtattgcaggaggcagaaattacttccatatcaatgcaaatggagatgcagagccatgtgtattcatccattattccagtgccaatattaaagaagtcagtgtactggatgcattacgccagccgttatttatggcttaccataataaccagccatttaataagaatcatctccgtccatgcccgatgcttgaaaatcctgaaaaattacagcagatggtacatgagaccggtgcaaagtcaaccgatcttcagtcaccggagagcgtagagcatctttgtggaaaatgcgaacagtacgcaacaatatggaaagagaaagcggatgaactgtgggaaaaatcaggaaaagcagagaaagaagaaaaaaaagcctgaaatgaaggctgcagaaaaagaaagctgtagaagaaaaaagctgtaaaagaaaaaacggtagataaaaaatggtgtgatctgaaaagtgggatcacaccattttgctgttatcagtttgctgaaagaattgattttacatgttcgacttcttcacgagtggctttctctgccggaacatagtaacttttttcacgggcgatctgatacagcttttcctgtgacatctcgcactgggagcggatctgcttaagacactgcttaagttccttattttctgtctgtgggatcatatccccgaacatttttaattcaccgttgacaccggtgagggcatcggcaaccattgtcttttcgttcatgatcattcctcttttctatttcattttggagttccctgctgaaattttatgctgtggactgaagctgtttataaaaatttcatcagttcctgcttatttttcattgcggaatctgccgcatcctgaaataattttttgacttccgggtcttctgtctgagaagcgtagtctgtcatttttgaataagttgttgcatatccgccaatcagatggcggagattctgcagatcgagaatggatatctctcccatggtttacttcctccttgtcagtcagttttaattgcgaagcatacgatcaaaagatccggtggatctttttcggtacgtgaatagtatggtttattttgcagaaattattcaccggaaacagaacaatgttctacaaaatttttaaaaagtgtccgcatttcaggagaagtgcggaacatgcattcaggatgccattggacaccgacaccaaaaggataatctttcagttcgatcgcttcaatcgtttcgtcacaggcacgggcagtgactatgatgccttttccggtgagattgacagcctgatggtggaaactgttgacatagagagaagttccgagacatttccgtaaatgtcctgtcctgccgatacggattttatgactgatatcactgcgaacatcggtttgttgcatatgatccagtgtctttccgggaatcagagaaaaatcctgccagatcgtcccaccacaggcaacgttcagaagctgcattcccctgcagatggcgaagacaggtttacgggaagaaagaatctgtctcatcagatgcagttgaaaaatatcggtagagatgcttgtacgtccgttcccgggaagaggggattcaccaaaaaggagcggtgtgatatcgccgcctccgcaaaagagaaatccatcacagagggaaacatactgattcagcagatcttctgagcgtaccagaggcagaagaaggggaagtccatgagaataccggacagactggatataaggattggagacaaactgatgatttccctccagtccgcagatgacgattccgatttttggctgcataaagatcctcctgttctgatgactgccggtgtccggcaaaaattctgttatgaaactgtggattatgatgtatgatagagtatgaaagaaatgaaaaaaatatacataggactgaggtgagtgtcatgaaatggatggatatgcattgtgatacagtaagtgaattatttagaaagagaagtgaaggaacgctttggaaaaataaattgtgtgtggatatcgagagattgaagaaaagtgattctgttgcacaatttttcgcatgctatgtaaatgcagcggaatatccgggatgggaagaagcttttgatgcagcagaaaaactgatccagtcggtgcatgaagaggaagcgaaagaattttgtgttgcaggatcaggggcagaactggaagcagcggagcaggcaaagaagtatgcagggatacttacggtagaagaaggtggtgtgctgaacggaaaagcagaacgggtggaacagctttatgaacagggcgtcagattactcaccctgacctggaattatgagaactgtatcggcagtcccaacagcagagatacagaggtcatgcagcgggggctgaagccatttggaatcgaagtggtcagacgaatgaacgaacttgggatgctggtggacgtatcccatctgtcggacggaggattctgggactgcatccggtacagtactgatcctattgtagcgtctcactcaaattgcagggaactttgcagacatccgagaaatctgacggatgagatgctccgtgcagtgggcgaaaaaggcggtgttgtgggattgaatttttattctgctttcctgactgaaaagaaagagagggcaggactggaaatgctggcagaacatgcaaagcggatgatccggatggcaggagaagatgcagtggcactgggaacggattttgatggatttgaaagaaaagatctgccggaaaagctggaaggagcagagaggatagaactggtatgggatgcatttcagaaagcggggatcacgtcacggcagacagaaaagatcgcttatgggaatcttttccgtgtgatagaggcaggatgtggaaaaacatcagtatcctgaaaaaagtgcggaaaaatgcagggaaaaagaagatacagtgagaggaaaagtcctttggtaatgataaaaaagtagtcaggtaagcaaggatatggtaaaataaaaaaagtgatttgatagtgcagttttcatattctgtgcaagaggatcagaagagagaagaggaggaaattgtaacatggagaacaaaagaattattcaggttgatgagaaagttccatttaagatgcttgttccattgagtattcagcatatgtttgcgatgttcggtgcttcagtacttgtgccatttgtatttggaatcaatccggcagttgtattattcatgaacggtcttgggactttattattcatcctgatcacgaaggggagagcaccggcatatcttggttcgagtttcgcgtttcttgcaccggctggaattgttatctcaaaatggggatacagttatgcactgggaggctttgttgcagtcggattctgcggatgtgttttatctctgattatttataagtttggatcggactggatcgatgtggtacttccaccggcagccatgggaccggtagtagcactgatcggtctggaacttgcaggaacagcagcatcaaatgcaggactgaaagatgaagtgatcgacagtaagaatgtgattgtgtttttagtaacgttactgacggcagtacttggatcggttgtattccgcaagttccttgccgtgatcccgatcctgattgcgatcattgcaggatatgttgctgcgttgctctgcggaatcgtagatttctcagaagttgctgcagcaccgcttttttcactcccgaatttttcaacaccaaagttcaaatgggaggcgatcgtgatcattcttccggtacttctggtcattgcatcggagcatatcggacatcagatcgtaacaagtaagatcgtcggaagagatcttttaaaagatccgggactgcacagatctttattcgcagataacttttcgactatgatctccggcctgatcggttctgtaccgacaacgacttacggagagaatatcggagttatggcaatgacaaaggtttacagtgtctatgtgatcggaggagcagcggtgctgtccattatctgttcctttatcggaaagatgacaactctgattaataccattccaggtccggtgatcggaggaatctccttcctgctgtatggtatgatcggtacatcgggtatccgtattcttgttgaatctcaggtggattatggtaagtcaagaaatatggcaatgacatccgttatttttgtagtaggattgtcaggcattacggtacagtttggaagtatccagttatcaggaatggtactggcatgtgtgatcggtatgttgatgggactgatgttctatgtactggataagctgaaactgacgaatgacagagaaagtgaatagatagaaattctatgaaaactgctacagagcagtgatacagacgaaaaaagggaacatttctttatggatcggtataggtagcacaccataccaagattcataagagatgttcctttttattgacttgacaggaaagattttgcaggttatatttaaatcgtaagtagtaagtggtaagtaataagcagcgagtagcaagtagtaatggtagatgattgaagtcaagagaatgatcatttacggagaaaataattgaaattgagaaggaggaacggggatgagagagttaaacttatcagagcaatatgcacttatagcattggaagggcaggaaagccttcacagctccgtggcaaaaagtgcggtgcttcgtgcggtcacggcagcggaagtgctgatgccggttttggaaaaagaaggatgttctttatctgaatttgctgaagaagcggagaaagcggtacaggcagctaagaatatgaataaaaaggaagagcgtcagattgagcagaaagtgaaagaatctttggaaaaggaaggtctgttgtgcgagattccggatcttcttgggtgcgatctgaattattattcatcagggattgaactgaaatcatatcggagtgaagaacagacttatttcaggatcagggaaggtctgcgggcagaaatcctggatgacggagaaattacgatggagtgtctgagtctcctgtggctgctgcgtgaaagcggctgtatccatgatctgttttcagcaacggaacaggaaagggtacttgaacgggtgaatggaatggctgcggaaaacgaatattgcagaatcttgtgggaaaaagaatttcacagtatttttgagagctttacagggcgtttcctgcgggcaaaaagtaaactgtttgaaaatccttatttagagggagtcagtctggcattcccatatctggagagaagaaaagcaatctttattgactgtgtggtatttgggacgaatgtagaagaacggagaagtgctgcagttgattttttgagaaagatgggacataatgttgaggaagtcagatcaggcagcgagacgctcctgaaaatagacggtatgtattatcgtatttttccggcaacaagaagatcctataaagtgccgatccagggcgtaaatcttgttccggtatactggtagagaagaaaaggtgagaaaatgtccagacagagaagcatggaagtgatagaacagtcagagtatgtaacaatcggggagcttgtcaggctgaccggtgtgagatacagtacactgaagttttatacggaagaagggatgctgccatttgagcaggcagaggaaaatctgacccggcgttacagacgggaagaaagtatagagatgatctataagattcggaaaatgcgagaagaaaaaatgacgatcccggagataaaaggaaaaataaaaggataaaactctttgaagaaaagccaggacagatcgtgagaaagtcgaaaagtaaaaaaaagtcgggggcttttgcccccaacataatcggaagatttatcggaaagaattatttcttctgagtctcaacttcctgcatcttcattgcacgaaccttcagtggcagtccgaacagattgataaatccgtcagcatcatgatggtcatacagatcacctgtagtgaagcttgcaagagattcactgtacagagaataaggagatgtctcgccggcacggatgatatttcccttgtaaagtctgaatttgacttcaccggtcacatactgctgcgttacatcgacaaatgcctggatggcttcacgcaatggtgtataccattttccctcatatacgatctgtgcgaatttatttccaaggtcttttttaacttcatatgtagcacggtcaaggacaagctcttcaagctgttcgtgagcagccatcaggatcgttccgccaggagtttcatagacaccacgggatttcattccaacgacacggttctcaacgatatcaacaataccgattccatgctttccgccaagttcgttcagctctctgatgatatcagaaactttcatttcttttccgttgacgctcttcggaacaccggcttcaaaagtcattgtaacgtattcatctttgtcaggagctttctcaggagtcgtgcttaatacgagcaggtcatcataatttggctcgttggcaggattttcaagctccagcccctcatggctgatatgccataagttacggtcacggctgtagctgtgctttacgtcaaatggaagatcaatgccgtgctgcctgcagtattcaatctcgtcttcacgggactgcattgtccatacatctgtcatacgccatggagcgatgatcttaatatcaggagcaagtgccttaattccaagctcgaaacgaatctggtcatttccttttcctgtagcaccatggcagatggctaccgcaccctcttttcgtgcgatctcaaccagtttctttgcaatcgccggacgggccatggatgttccgagaagatatttgttctcataaactgcacctgcttttacgcaaggtacaatgaagtcatcacagaactcatcaacgatattttcaatatataatttagaagctccggaaagctttgctctttcatccagtccgtcaagctcttctccctgtccgcagtcgatgcagcagcagacaacatcataattaaatgtctctttcagccagggaatgatcgctgtggtatcaagaccaccggaatatgccaatacaactttttctttactcatttttcatgcctcctgaatgtaatttatacctctttggttctgggtaagataccgagaggggatcctgcgaaaaccgcagtcctgtcaatctccgcttcgataagctacagaatactatacactagattttataattatgcaagagaaaatttataaaatcaattaatatacataaaacatgcaaatatatgcataaaaatacaaaaatattcctgcatatgcataaaattcagaatgacagatgcaggaatgagtgacgatccggtgatttaacgtaccaaagaagaagccattctgcggtaagtatggcgtttcccgcggatcgcaacgctgtaggcagtgatattttcaggaagagccattcccatatatccgctgtctccgatatgatggatgtctgcccctgccatcttgcacatcagagcaatctgacggatcgttgcctcatccgccccttcctgggaagtaccgatcgtagtcatggcgagagcttcttttgcatgggcctgacggatcagggtacgtgcatactccaaagtgatgcccggaacagttccgggagccggaagcaggatcacatcagctccggcttcaataaactgatccgcatcttccggtgtgagaatgttttcacctgcttcagaagcaataccggaagcgtgcatttttccggcagtcaggatgacccggtcaccaactgcttctttcaactgggtaagtgcgtgaatgatggcctgattttctaccccgattcccggatttccggtcagaatgatcatatcaacccccatgtcagccgccttttttgcattttccaccgtggcacagcgtcctgaagtaagatcccagacagattcttcttcctgactggattttggcacatacgcaacaggctccagattgatggcaaccattttcccggtcagtcttttgatttcccggatcgtatcctccggggcaacatcaggaagtccctggattattgggtgattcacatcaaagatattgagcatgatcaaatcggatcccagcgaagcaacaaattctgcattcgtgatatttacaagcatgggtgtaaccgttccaatcgtttcagtggcaagtacgcggccctcactctcggcgatcgccctgagcagatcctcttttgtataagctgccagttcacgggcagtacagtctatcagtctttttttcattttacagatccttctttctttttaaaatattgggtatctgagtatcagtatataacagatgaatgcagaatgggaaaaataataaaattacccgggaaaaatacaaggtcgttgcaaaaaaaatctgaatccgataagatgatgtcgggggcttttgaacccgacatcatcttattatagaagagcaaaaaagaggtcaggaaaatgaaggaaaaaataaaatgcacgatccggtacagcattctggcactggtcaccggagtggcagtcggtgccattgatacaatcttcggaagaggacttttatggctgtcagatttcaggacagctcattacagatatctgctgccatttcttccggttgcaggactgctgatcgtgtggatgtatcaccggttcagtgaagaaagtctgaaaggaatgacgctggtactggaaaccggacagaaaaaaagaaaatcgatcccactggcacttgttccactggtaatcgttggaacatggctgacgcatctgtttggaggaagtgcgggaagagaaggagtggcagtacagatcggtgctgtgatatcccacgaggcaggaaaaaaatttcgctgcccggaaaatgacaggattatgctggttgccggaatggcagcaggtttcggaggactttttcagaccccgctggcagcagtcttttttgcaatggaggtgatcgcttcaggatatatgcagtatgaagcattactgccggcaatgatcagtgcttacacagccgcttttacctctcatatactgggactggaaaagtttacagcagtgatcggtgagaagctggatctgtcagagacaaaggtgatcctgagtctgatcgttcttggaattttgttcgggctggtcggaagacttttttcaggaacactgcaatggatgaaaaaacggatgggcaatgccataaaaaatccatacataaggatcggagcagtggcagtatttcttgcagttcttttgttcctttttcacggaggcagatacagtggactgggaacgaaccttatttcagcggcctttgaaaatggaacgatctatgggtatgactggatattgaagctgggatttacggttctgacactggcaatcggctttcagggcggagaagtgacaccgcttttctctatcggggcatcattgggaatccttgcaggaaatctgctcggtatttcccctgtggtctgtgcagcacttggctatgcggctgtatttggcagtgcgaccaatacactgctcgctccggttatgatcggactggaagtatttggaacagaaaatgcaattccgctggtagttgtatgtatccttgcgtatcttatgaatggaggaagttctatctatactgcacagcagcgggcagtcctgaagctggatggagagaaagaagcggtcagtgaaagaggggcaacggaaaagcagaaaaataaagcaatgagacagtgaaggagctaagaagagcaggggatggaaaagaaagaaataaaaatcttccgggcgggcagagaatcgctggaagaagcggtccgactggtacagagtacggaagaaaagatgaaagaaaaaagctggtttgtggcagaaagcctggaagaatttgaccggtggatgaggaaagatcagggatggctgtatgtggcaaaggattgcagcagcggacaactggctggaatgttttttgttgtcctgccggggatggaagaagaaaatctggggtacgatatcggtatgcagggcaggcagttgtatgagtgtgccattatggatacggttgtggtacttcctgaatacagaggaatgcatttacaatatgaaatgatgcagactgcggagcgaaagcttcacaaagagggttatcgttatcttctctgtacggttcatccggaaaataaattcagcagggagaatgtgaaaagacagggatacaaaaaaatactgacaaaagaaaaatatggtggatttttgcgggatatctggatgaaagaactgtaaaatatctgaaattgagattggttgcagaaaggcaacttccgttgcaaaatggcaacaaagattgcgattgactaaccctgcggatcttttctaaaatgaaaaaaaggagggattgttatgcaggcgttatcagatgcaaaagcaggggagaactatacgatcaagtggatgttcggacttccggaagttttggagttcctgcacagtcatcatgtagaagaaggatgtgatgtgcaggtaatccagaagatgacagacggagtgatcattgcagtacaggatacgagatttgtactgggaaatgagattgcagaccggatccaggtatgataaaataggtttcaatcagaaactgaaaggagacggaatgatggaaagttatatgcagatgctggcaaagcgttccaaagatgcatcaagaagtgctgcgaagcttggcacagcggataagaaccggggactgcttgcagtagcagatgagctggtagcagagcagcaactgatcctggatgcgaatgcaaaggatattgaagcagcgaagaaaaagggcgtgaagcagtcgctgatcgaccgactggagctttcagaacggcggatcgcagatatggcggaaggtctcaggcagatcgcagcactggatgatccggtgggagaggttctctcgatgaagacgagaccgaacggtctcaggatcggacagaaaagagtgccgctgggagtggtcgggatcatttatgagtccagaccgaatgtgacggctgatgcatttggactttgcttcaagaccggaaattcagtgatcctcagaggcggcagtgatgcaatctattccaatcaggcgatcgtccatgcagtgaaggacggtctcagaaaagaaaagctcaaccaggatctgatcattctggttgaggatacggacaggaaagttgtcaatgagatgatgaagatgcatggctggattgatgttctgatcccaagaggcggggcagggctgatcgcaaacgtagttgcgaacagcaccgtgccggtcattgagacgggaaccggaaactgccatatttatgtagatgaatctgcggatatcaggatggcagccgagatcatcgagaatgccaagacgcagagaatgggtgtgtgcaatgcctgtgagtcactggtgatccattccggtattctttcaaaggcaatgccggagatcgtgaagaagctgaaagcacataatgtagagatacgtggagacgagagagcctgtacagtgagcaaagagatcattccggcttcagaagaagactggggaacagagtacctggatgcagtgatctcagttaagacagtggattcgctccgggaggcgatcgatcatatcaaccgttataatacaggacattcagaatcgatcattaccaaagattatgcaaatgcattgcagtttcaggatgagatcgatgcggcagcagtttatgtgaatgcgtccacaagatttacggatggctttgaatttggattcggggcagagatcggaatcagtacgcagaaacttcatgcaagaggtccgatgggactgaatgcactgacaacaaccaaatatattatttttgggaatggacagataagaaaatagcagaaaaatataagggtgagacaggaaaaggcagacacattaaagtggtgtgccagaagcctgtccacccttattttgaaatactacttgcataatatgcataaaagatgtattattatgcaagtaaaccgcatgatatgccagatgaaagcagagaatggactgaaaaggagaggcaaatttttagagacagtttttttaatggaaatactttacttcctataaaaggtggtatatcataaaatgatatggcatatggcagtacgttaccatagcatagtaaaaatgaaaggacttgagaagaattatgattaaagtcggaattatcggagcgaccggatatgcaggcggggagcttgttcgtatattaatgggacataaagatgcagaaattaaatggtatggttccagaagctatgtagaccagaagtatgcagatgtatacaggaatatgttccagatcgtggatgcaaagtgcatggatgacaatatggaagagctggcagatcaggtagatgtgatctttacggcaacgccgcagggactttgtgcatcgctggtcaacgaggagatcgtgtccaagacgaagatcattgatctgagtgcagacttccgcctgaaagatgtcaatgtatatgaagagtggtataagatcgaacataaagcaccgcagtatattgatgaggcagtttacggactttgtgagatcaacagggatctggtaaaatccgcaaggattgttgcaaatccgggatgttatacaacctgctcgatcctgacagcttatccgcttgcaaaagaaggtctgattgatatgagtactttgatcatagatgcgaagtccggaacttcaggagcaggaagaggtgcaaagcttccgaatctctattgtgaagtgaatgagaatatcaaagcgtacggtgttgcaacgcaccggcatacaccggaaatcgaggaacagcttggctatgcatccggtgagaaagtggtcttgaactttacaccacatcttgtgccgatgaacagaggaatccttgcgacagagtatgcaacactgaaaaagaaagttacatatgaagaagtaaaggcagtttatgatcagtactatgcaaaagaaaaatttgtcagagtgctggatcgggatgtatgcccggagacgaaatgggtagagggcagcaactatgtagatatcggatttaagatcgatccgagaacgaaccgcatcattatgatgggggcgatcgacaatctggtgaaaggtgcggcaggacaggcagtacagaatatgaatcttctgttcggtcttccggaggatgaaggactggaattagttccgatgttcccgtaaagcgataaaggtggtatatagatgatacgtgtaatgacgattgatgattatgacggagtgtatgcactgtggaaaaagatcaaaggattcggaatccgcagtattgatgattcaagagaaggtgtagagcgtttcctgaagagaaatccgacgaccagtgtggttgccgttgaagatggaaaggtggttggaagtatcctgtgcggacatgatggaagaagaggctgtctgtatcatgtctgtgtggatgaggcataccggagacatgggatcggaaaagacatggtcgtatatgccatgaaagcattgcaggacgagaagatcaataaagtatccctgatcgcatttacccagaatgatataggaaatgcgttttggaatacgatcggatggacagagcgtttggatctgaattattatgattttacattgaatgaggcaaatataactgcatttaatgagcagtgagaaaagtctgccggtcaggtggcagtgaggagaaaggaagcggatacgatggagataatcaaaggcggagtgacggctgcaaaaggatttgaggcagcggcagtggcagcacagatcaaatatcagggacgtacggacatggcactgatctacagtgaaaagccatgcaaggttgcgggaacatttacgacgaatgtagtgaaagctgcaccggtcagatgggacaggcagatcgtggagaataagcagaaatcacaggcagtgatcattaactcagggattgccaatgcatgtaccggtgtagagggaatgatgtactgccaggagacagcaaaagaggcggcaaaggtactcggaatcgaagaagcgggcgtgctggtcggatctaccggtgtgatcggaatgcagcttccgatcgacaggatcaaagcaggtatctcagagcttgcaaaagtgaaaaaggctggcattgagagcggaacagaagcagcaaaagcgatcatgacgacggatacaaagaagaaagaggttgctgtgcagttccagatcggagataagacggtaacgatcggcggaatggcaaagggatcaggaatgatccatccgaatatgtgtaccatgcttgcatttattacaacggatgcagttatttcaagaaaagctctgcagaaagccatgagcaatgatgtggaagaaacttataatatgatctcggtagacggagatacatccacgaatgatacggctcttctgctggcaaacggaatggcaggaaataagaagatcaaaaaaggaacaccggaatttgaggtattccaggaggctcttcattatgtcaatgagacactggcaaagatgatggcaggagacggagaaggtgctacggcattatttgaagtaaaagtggtcggtgcgaagacgaaagagcaggccaagactctcgcaaagtcggttgtctgctccaatctgacaaaagcagcgatcgcgggacatgatgccaactggggaagaattttatgtgcaatgggatattcgggtgcaaagttcgatccggaaaaggtagatctgtatttcgagagtacagccggaaaactgcagatcatcaaagacggaacagccgtggactacagtgaggaaaaagcaacagagatcctttcacaggaaaaggtaacagcaacggctgatctgaaggcaggggaagcagaagcaacagcctggggatgtgacctgactcatggatacatcgacattaatgcagattacagaagttaaggagaatttgaaaaaatgaacgataatatgcagaaatatcttgagaaagcagaagtcctgattgaggcactgccctatatccaacgttttaaccgtaagatcattgttgtgaaatatggtggaagtgccatggtagacgaagaactgaaacgtcatgtgatcgaagatgtgacacttctgaagctttgtggattcaaaccgatcattgtgcatggcggaggaaaagagatcagtaagtgggtcggaaaagtcggaaaggaaccgcagtttatcaatggcctgcgtgtaacagacgaagagaccatggagatcgctgagatggtactgggacgtgtcaacaaaagccttgtccagcttgtagagagcttaggtgtgcgggcaatcgggatcagtggaaaagacggagaactcctgaaagtagaaaagaagctttccaatggagaagatatcggatttgtcggagatgtcaagcaggtcaatgctcagatcctttatgatcttctggaaaaggattttcttccgatcatctgcccaatcggaatggatgatgattataatacctacaatatcaatgcagatgatgcggcatgtgccattgcacgtgcgatgcaggtagagaaactagcattcctgacagacattgagggcgtttacaaagatccgaaagatccgtctacactgatctcagagctggaagtcgaagaggcaaagcatctgatcggagatggatatatcggaggaggcatgcttccgaagctgcagaactgtatcgatgccattgaaagcggagtatcaagggtacatatcattgacggaagaatcccacattgtctcctcctggagatctttaccaataagggaatcggtacagcaattttgagcaggaaagaaagtaggtattacaatggtgaacagtaagatacaggcagcagaagaaaatctgatccatgtatacaatcgtttcccgattgcattggatcatggtgaaggaatgtatctttatgatacagaaggaaaagaatatctggattttgcagcaggatttgcagtgtcaggtctcggatatgacaataaagaactgaatcaggcattaaaagatcagattgacaagttatatcatacatccaatctttattatcatgaaagctgcggagaagctgcacaggaactgaaccgtatttcaggaatggacagagttttctttaccaacagtggcggagaggcaaatgaaggtgcattaaaagctgcaagaagatatgcctatacaaaaaagaccggacgctatgaatttattgcaatgaacaattctttccatggaagaagcttcggtgctgtatcagtgacaggacacgattcctacagagaaccgtttgaaccggtagttcccggagtgaaatttgctacgttcaatgatcttgacagtgtaaaggcactggtgagcgataagacctgtgcaatcattttagagccgcttcagggagaaggtggaatcaaccttgccacgcaggagttcatggagggaatccgtaagatctgtgatgagaatggaatcctgatgatctgtgacgaagtacagtgtggtatgggaagaacaggttctatgtttgcatggcagggatttggagtgaaaccagatatcctgaccatggcaaaagcaatcggaaacggaatcccggtaggagcctttgcaatgacggaagaagttgcaaaatattcacttcagccgggtgaccacggtgcaacttacggtggaaatccgctggcatgtaccgctgtcaaaactgtgatcaagatttttgaacgggatcatatcgtggatcatgttaatgcagtagcaccatatctgacaaagagactcgacgaactggtagaggaactggattgcgtgacagagcgtaaaggcaaaggtctgatgcagggaattgtagtgacgaagccacttgcagaagtgaataagagggcgatcgaggaaggaatcctgatcatccaggcacagggaaatgtgatccgttttgttccaccactgatcgtggaagaaaagcatattgatgaaatgatcgaaaagctgaagcgggcattggcttagaagaaaacagaaaaaagaaaccgaaatgaatctgcccggaagtgaaaagggcgaataagaaaccggctgtcgtacatactatttagtatcttgccaaaaaggatacaaaaggaggtatgggaagatggccggttttctaattgcacttttatcaggtgcgttgatgagtgtgcagggcgtttttaatacgcaggtgaccaaatcaacggggatctgggtgagtaacggctgggtacagttgtctgcttttgcactgtgcgtggtggtctggttggcaacgggacgggaatcagtctcaactttatgggaggtcagaccgcattatatgttgttgggaggagtgatcggggcagggatcacatggacagtcattcagagcgtttctgcccttggacccgcacgttctgcgttattgattgtgattgcacagcttgcggtttcttatctgatccagctcttcggacttttcggaatggatcaggagccattctcgtggaaaaaggcaggaggacttcttctggcggtggcaggaattatgatctttcagctttccggtacaaaataaggaaaacaggaaaatgcttttgtcagatcttacgatcggtaacaaatgtaatacatctgtaacaaagccttaaattttctattgtaattctgacagaaattcgttacaatatttttatccggcatacaaggggtggctcacagtcagaaggatgtgaggcagatatgaagaacggatggaaaagatggatcaggggatggagcctgatcgtgatactgttatcagtgttatcagtgtcaggatgcagtgtgtcagaggaggacggtctgcaggaagtgacagaaaaagtatctcaggaaccggaggtatcgcagaaagattcgggaaaaagtgaggatcaggagaagcctggtcagacagaaggagatacggatacagggagtaaaaaaagtgcagagaagaagatctgggtctatgtatgcggggcagtcaatgctccgggagtttacgaactgaaagaggacgcaagattatatgaagcgatagaacttgccggaggtgtgaaccaggaggcggcaccggaagtgctgaaccaggcaagggtactggcagacggagagcggatttatgttccaaagcaggatgaggcagagtcttattctttgcaggatcaggggttggaaagtaacgcgggaacagcggataccaggggaaagataaatattaatacagccggaaaagaggaactcatgactttgcccggtatcggagaagcgaaagcagaaaagattctgcgttaccgggaagagcatggtgcatttcgttccattgaagacgtgatgcagattgagggaatcaaagagggagtatttaataaaataaaagaagatattacaatatagcagcaaaaagacgggaaagaagaatatgagcaagaagattttagttgtagatgatgaaaaattgatcgtgaaaggaatctgtttcagcctggaacaggaaggtatggaagtagattgtgcatatgacggggaagaggcactggagtacgcaaagaagtgtgagtatgatctggttctgctggatgtgatgcttccgaaactggatggatttcaggtatgccagcagatccgggagttttctgatatgccggtggttatgctgactgcaaagagtgaagatatggacaagatcctgggacttgaatatggagcagatgattatatcacgaagccgttcaatattctggaggtgaaggcaaggatcaaggcgatcatgcggagaaccgccaaaagaaaagaagaaccggctcagagtccgatgcttgtcaaaggcaatatgaagatcgactgcgagggacgcagagtctttatcggggagaaagagatcaatctgacagcgaaagaatttgatgtacttgagctgctggcgatgaatccgaacaaggtctacagcagggaaaatcttctgaatcttatctggggatatgattatccgggagatgcaagaacggttgatgtgcatatccgtcgcctgagagaaaagatcgagatgaatccaagtgaaccgaaatatgtacatacgaagtggggagtgggttattatttccaggggtaaatttacggtcagactaaaagataatatttttaaaaatctgagattccgggtattcctggttgtgatgcttgccggactgattcccggcagtgcagcattactgggaattgtgaaggtttatgagacccgtgcagttgccctccgtacagcagagatccagaaccagtgtacgattgtgacgaatcagatgagtacgaatcactatttttctgatacatcttcagaagtgatcaattcggatctgatccagttgacaaacatctataacggacgggttatggtgattgacgaagatctcaatgtagtgaaagatacttacggactggatgagggcaggatggatgtatcggaaaatgtgatccggtgcatgaagggagaaagcacgaacagttacgacaaaaagaatcattatattgaagtgactgcaccggtgacagaaatcggaagcagacatacgatcggtgtgatggtggcgagtgtatctacagacagcatcgaggactctattcatatcctgtatacccagggaggactgatcatcggattatgtatgatcctgcttgcgattgttgcggttatatttgcagacagggtagtaagaccattgcggaagattacttcagcgattgagaatgtcagtgcagggtacagtgacgatatcctccatgtagatacttatacagagacgaaaaatatcagtgagtcgatcaataagatgatgggacggctgaagcttctggatgattcaagagaagagtttgtatcgaatgtatctcatgagctgaagacaccgatgacttcaatgaaagtcctggcagattctctgctggagcaggaaaatgttccggtagagatgtatcaggagttcatgggagatatagcaaaagaaatcgaccgtgagaataagatcattacagatctgttatctcttgtaaagatggacaagaaagggcagacactgaatattgagtccatgaatatcaataatctgttagagcagatcctgaaacggctcagaccgatcgcccagcagaagaatgttgagattgtaatggagagtttccgccctgttacggctgagattgacgagacaaaattctcacttgcgatttccaatttagtagaaaatgcgatcaaatataatcgtgacaatggctgggtgcatgtctcactgaatgcggaccataagttcttttatataaaagtagaagattcagggatcggaataccggaagaagatcaggcttatatttttgaacggttttatcgcgtggataaatcccattcaagagaaatcggaggaacaggtctgggtctggcaatcgcaagaaatgcagtgatcgtgcatcgtggctcgatcaaggtgtacagtgcagagggagagggaacaacatttacagtgcggattcctctgatctatgcggcatcataggagggcatatatgaaaaggaaaaagaaaaaagctcttattctgagtgtcttcatgatcctgctgctggcagcctgctcaagcagaacgaatgtcagggacggggatgattatatctactgtctgaatccggacaagaccggactggtgaaagtcagttatgaggttcagggggaggatgtagtcgaagaggcgaaagacattttgagggaaatgcagaagccggccgacgagacccggtatacaccggctatttccaaaaagatcaaagtacaggactgcaaactcaggggaagtatcctggatgttgatttcaatagcgaatacagatcggtaaaaccactggaagaaaagctgatgcgtgcagcaatcgtccagtcgcttctgagactggacggagtgaatgcagtcagtctttctgtagacggcgaaccgttgaaaaatgcagacggagcggtgatcggtctgatgaatgaggatgattttgtagagaataccggatcttctttaagctcctatcaaagtggaacgctgactttgtattttgcaaataaaaaaggggataagctggtcgagcaaaagatggatgtccgttacagtagtaatgtcccaaagggaaagctgatcgtggagaagctcatgcagggtccgacggggaacggggcgtacccgacgatcaatcccgatacgaatctgctgagtgttacgatcaaggatcatgtatgttatgtaaactttgacagtacctttctgacgagtgtgtatgatgtactgcctgagatcacgatctattctctggtggactccatcatagcgggaacagaagccacgcaggtacagatcacgatcaatggagagacaaaggctgtctatatggaaaagatcgatctttcgcagcctttggaaaaagatatggactgggtcgcagtaaatgacgacgaatgatcaaaagaaaattagtaatggcatgtctgtttgtactggccgttcaactggctcgtgtctgcctgctggcagatacgaaagaccagcagatgaccctggcagaagaaattcctgacggaacagaggtttccgtcagtggtacagtggagtgggtcagggaaaaagaaaagataacggcagtctgtctcagaaaaaatcaggtgagatacgccggaaccattctgaaagaatcgaaattagtggtctgtatcagaccggatcagctaaaagaacaactgaatataggagataaagtgatcgcggaaggggaaaaggaatcttttgatgcagcacgcaatcccggtaattttgatcagaaagagtattacagaaagcagggtattcatgtaaaggtcagggcggatacgctggagaaacaatcggaaaaatctttgctgtatgaccggataaaaaatgaaatgtggaagtggagaaaaaaactttcaggacagcttcagacaaagatgggatcttattatggcgggacgatgagtgccattttactgggagaaaagagcgggctggatgaggagatgcggaaactgtatcagaaaaatggaatgggacatcttcttgcgatttctggcctgcatatgtcattgatcggaatgggactctattcctttctgcgaaaagccggtacttcctttttcactgcggggatggcgggcagtagtttcctgttattgtataccgggatgacagggaatggaattgcaagtcagagggcatggattatgtttgcaatgcgaatgggagcagaaataactggaagagaatacgatgcactgaccggactggcagcagccgcagtatggatctgcctgagacagccgttgtatctgacagatgcgggatttttactttcttttggtgcaattttggggataattctgatagaaccggtgtatgcgggggaaaaagcggagaaggaaaagaaggagcgggaaaagaagccggttttcctgaaaggactttcagcaagttttgcagtgaatacggtactgatgggaccggtactctggttctattatgagattccggtatactcggtcattctcaatctggtggtaatcccgctcctgccggttgccatgggagcagggcttttggggttgggaatcctccggttttcagaacgggcaggtggtggatgtctgaatctctgcaaagcaattctgtggatctatgacagaatcggagaactggctgcccggctgcctgtcagccgatgggttacaggaaaaccgccactgtatctgcttgtgatttactatgggctgatactatggatctgcatctggttttaccggctgaaagaacgaagaacagaaaaggaacagagaaaaacaaaatcgagagaaagatggatgggggtgccgggaatcctgctggtgtgtcttagtgtactgctgccaggaagctgctggctgatgcatcaggtgcaggggcaggtcacagtgacagtactggatgtggggcagggagatggaatctgtatccggatgccgggaggaaagaactgtctgatagatggtggaagcagtgatgtcagttccgtcggagcataccggatcgagccatatctcctttattgtgggatcagaaacattgattatgcatttgtgagtcatggagatgaggatcatatcagcggaatccgtgaactgctggaagatcagaggcttgggatcggaatcaggacgttagtacttccggcagaagaatactgggatgagaaattaaaagaactggctgtgctggcggcagaaaatggaacaaggatcgcagagatacatgccggagagcaggtcgtggacggaacaggagaacagaagatgagccttcgatgcatcggcccggaaatgggactttccgaaagtggaaatgctgcatccatggtactgcaggcagaatatggaaacttttcaatgcttctgaccggagatgtggaaggagcaggggagaaacaactggtcaaaagtggaagactcggaaaatgcaggatactgaaagcagcacatcacggttcaaaaaattcaggtacagaagagttccttgatgcagttgagccgcagattgttttaatttcagcaggacggggaaacaaccccactacgaaaatgatacaagcctaaatatgtaaatcccttaaaataaggcgttttcacgttttgaaacgtggaattatgcctatttaactcgtaataacgcaacacagggtaaattctgaatgctctattttgaaacccctttaacgataggtatgagtaatcgttatattgtaggggtatcgttaaattatctaaagcagagaaactctgcatcaatcgtgccaattccggcacaagtatcaatttggacatattaagaaaaaaggaggaacagcctattgttcacaagaagagaaaagcaactgctcggaggtgggtactttaccattatccgagaggaagataagtatgttgagattaggagtaataacacacaacatcaatggattatttttaagaagtcatttgattcgaataaacctgtgaccttgtatcacaagcatacagcagatacaaagtattaccacaagcattgggagacctggacggtcgcaaaggctgtggagggtataaaaagccatgatacatatgtaattaaaaatggagaagccatcagatggatgaaacagaaaggaagggtaaactatgggagcatttaagaaagaacgcaagatgaaggtatattcgcaatcagggtataagtacaaggataccgccacaattattttgaaaggggattggcttgaaacattagggtttaagcctgaaacaccaatccgggtagagtgtgagggtggtaggcttgtgattacagtatgggatgaaataattgcagattgattgaacaataaaaagagagcaacatggctctcttttgaaatgttttacgatgaggctttttgatctaatggaaaaagttcggggtatatagaagtatgcttattaagtacagcttctgttcttgaacttttttcttctcttgcatggtcaaaacagattattgtttgaagaagatttatgccgccagctttcatgcaaatttcattaattgatagaccactatcttcaggatgagatgctaaataattggctatgataggagaatttgcaaatctttgttctgttatttctgcgtcaagacaaaagtttttgtgcatttccttaatggatttgtcatcgtacttgacgataaaaatactctcatctatttgattatttggagtcagaatacaactatcgtctaggtgttttccgacagatagtgaggttgctttataagaaaatgttgaaaagatttctgaacctgcacgactatcaaaattgttatcacctaaatatactcgtccgatatcaattctttcatctttgtaatataggttgagaatgtatagtgctccaagtgcatatattaggtttcttattgtggcactctttaatgattctttacgatcatgcttaactgcttgatatgcttgtttccatttactgccactagtacctcttttaaatgctttgtgcaagggcaaaataatagtgttttcaggttttgtgagataaacagttgcagctgagattgttattttctttttgcttaatatccaatgctgttctagaaggtttaaacaatccgtgtcgaagtataagtcacgtggttttccttcgttgtcgacgggagacatatttccaccaagatttttatatagttcttttgagattgcttcgatttctacagcgcatcgaacaattaaatcagcaatgtgcattgaatatatatcaagctgatcgtcatcaatatgaataaagtttgcaagttctaagaattctttttccaagttcttgtatacgggccaatacaaatttgggactaccatgaataatacctcctttataatactgaatttagtatacatccttgagaaatgattcgccagttaatcttgctatgagaacaagagtatattaggaaagttagcatacaactaccaagtatcaaagagtgccacagataaggttacatggtttttgacttgaacaattaggctttgagccggggcggaattgaagatagagtgtgaagaagggaaaattgtaattactaaggaaaaaaatagcagattagcacattggctaatctgcttgtatcagaacatttttcgtgttgtttctaaagcaattatatcatttgttttttgaaataaagcatcagcaatttgtggtatttgataaataaaataagcacccacctcacaaaaaatcccagagtaggaggtatttggaatattatcaaattctggaatatttacgtttggtatgtaaataaattgtgttggtgtaaaattgcaagttgtggtaatcacgatatcatctacaatgatgaatttggcatgcagatttgagttgacgaagtattgacaactactaatggctttggcagcggtagtgaaattgataaaagctgttttgttttcagggcttctacatccgtgattgccttctttatctgcataggtctgtgataggatagtggttggaataccatttcttgccttatctagtacagtagataaaaagccgggtttatccattcgggaagaattgtttgtgtaatacgaatagtcgtaagcgcatacatgttgtgctgcaacaacaatgcggctatttgcacggttaattatttgtattattcgttcctcaaaaagttgagcggagttttcataaaacggagcagtatataacactcgtgatattggtggagcgggtctcatggctatttcgtagtgattgtaatttgcttctgggtcaaatgaattcacttcaatagaatttatatcgagacctgaatagaaatcttcagctgaagtaacatctgctccttcgattgtttcaagattaaataattctatcttttgtgcatcacggacagctacattagaagaagtcaaccctacataagttgttccatctttaaacttgaaaagacaggttttacaatgaagactatatggcatattaccacgagagaaagcacgaaccctactacttcgtaaatacatatgtggaaatatatgtagcgtgaaattagcaataggatgatttattatttcggagtaaatgacttctgccaattgatatttggtctgccttcctaggctttcaccagtattgtgatctttgatatcaatgggtttatcgtcatcgtagccctctaaggggattgagtatacatcgacagttatcccttcactagcaagttctttcaatgtattaaataagtatttgttgttaaacagatacattgcaaatttgatggatgctaagttgtttttattgctcttaagccaatcgcagagacggactgtgtttttaggacttgaacctaaattattatatattcggctattgccgtattcaaaatcaattaatatctttggcaaggatatcacctcctaaaaagatgaataaattatatcatgtaaatgatgtcagcactagaaaaatgtacatttttcactggtaaggaagaagtttttttgatataataaatattatctatgcttatgccctgaatcgcacagattgagggcttttgctagtttagaaaaagtgatgaggtgataatatgtcaagagcatcagatgcatttgaatatgaaatagaatctatggtaaatgctcatagaggagaatgtctgccaacagttcttccgaattggttaatagctgaaggtgttagaccgggcgctagaataatcggagcagagggaattggaagtaaagatagacataataagacggatgtggttatttatcttgaaaattctgagcctataaagatatcagcaaaattaatgaatgctgactattttggaaattggtatgggcataaaagatttttggtagagtttggagaggaagccttttatagaatgacggcagcctcaactgcatttgcaaatagctgggctagaacagctacagcaccgtatgttggtgtaagtatctgttttggaagaagaactggaagaacaggtcaggattttaccgatatttttacaactgatgatatacttactgttgcaaggggatttggcgatggaattgctactgcaaattgtatgtacatagcagatacaagtgcgagagatattccaggacttattcgtagtattgaggctattactgtggattcagttaatgccgcaactgaagattttaaagttgcacatagaccaatcaaccctttaacagaaggaacgaatagagggaagaatgtttatacaagattccagccatacagagcgttgccagctcctacggttattagaaatcctcaagaacttttccgacttggcgagtttgttgaggtagaacctactagtctgaatcataatcacatcttggatgatctacaagcaaactacaatattatagttccaaggaaaccaagataataagttgattatacaaaagcgcagagttatactctgactactataattgaaggagacgataaaatgcagcttattagcttatttagtggttgtggaggattggatttgggttttgaaagagccggatttgatattcctgtagcaaatgaatttgacaagactatttgggagacctttaaagtaaatcatccaaaaactaaattaattgagggtgatgtaagacagattacaagagaagacatggatccatatatcgaaggagaaatagatggtattattggaggaccaccatgtcaatcctggtcagaagcgggatcgcttaaaggtatagaagatgctagaggacaattattctttgattacataaggatacttactgaattcaaaccgaagttttttttggcagagaatgttagcggaatgcttgcaaatagacactctgatgcagtacaaaatattcttaagttgtttgatgaagctggatatgatgtttctttgactttagttaatgcaaaggattatggagtggctgaagaaagaaaaagagtattttacataggttttagaaaagacttaggaattaaatttgagtttccaaaaggatcaactgaagatgatgaaaagaagattactcttcgagacatcatttgggatttacaggaaacagcagttccttccggtccgaagaaccatcataatccagaagctgtaaataataatgagtattttacaggtgcttattctacaatatttatgagccgaaatcgtgtgaagggatgggatgaacaggcgtatacagttcaggcatctggtagacagtgtcagttacatccacaggcacctaaaatggtaaaggttggaaaggacgattgcaggtttgttgaagggaaagagcatctttacagaagaatgacaattcgtgaaattgcaagagttcaaggcttcccagacgatttccagtttatttatgaggatacaaataatgcatataaaatgataggaaatgccgttcccgttaatttagcatatgaaattggtgtggctataaagaatgcactcgaacagtagatgtagtgctaagattagggcatcggggatattttcctcggtgccttttttggtggtgaaatatgagaacaatgttattaagttttaaacctagtgtttatgaaaacataaagacaggagtaaaaatatttgagcatagaagatcttttccaaacgagccaataaaagcttatatgtatgtaagcagtccggtttgtgcgattactggaatcgtgtatctaggaaagagacatgaacttaaagattgggaattggaatttgcagatgataaagatgctgtctggagaataaaaaagtacagggaatcttacaattatgcaatggaggttctggaattccaggaaacaacaaaaatttcattagcacaagtaagagctgatgttgaagggtttgtagctcctcagatgtattattatttggatggtaaacctttattaaactatatagaagaaaatcttaaaaacaaagaaataaacattaaacatacatttgaaaatattacttcatcacatgtgtgtgttcattagtttgaggattcgatatgaagagaacgcaggaaatagaattaacaaatatgtgtttagtatataatgatatcatcacttgattgttcttcatttacaaacccttatcagatgaaagagtatacggagatgcgacttgcagattattgtaagccaaccatatcttatgttcttaaggctatggatttatcggtgctgacaggatatgaacatgaggcatgggaactaggagattatgtccgtgttgaggataaggatttaggactttctgttactacaagaattgtgagaagggaatataatctgcaagagccttggaatacggtacttgaactatcaactacactaaagaacctcggaagctccacaagtaagtgggacaatgctgcagattcgcttgaaggtgtgagcgttgtatccagtgatgatatagcagaacttgtaccatttaatttgttgcgtaattcccgtgcagatgacggacttgcctactggacttcatctggctttgaagcagatggaacaacaggtgcaagtggtacggcatcatttaaggcagagggcgtgtctggaatgacaaagagcctttcacaaacggtgtatcctgccaatagagacagttatacaatctctgcacagattgcatcggagaatctaaaaaaactaggagtagattcacaggtgggaatcgagattgtcattgagtatgaggatggtagcacagagaaaagatttatagacctttactagaaggagggagtttatggcttatttttcaaggacagcggccaagattacaccagatggtaatggggaaagagtgaaatgtataaccgtccgtgtatgtattacaaactgcacgggcgagttttatattactgacattcttttacaaggtggctctgtagcaatcggatgggtgggacatccgtcagagataaggtggacgcttgatggctgagtttataagactagcagaggtggtcaataagaaaaaggatatgcgtgttgtgagtatatcggtgattcctaccattacagactgctccggcacgttatggattacagatttgcagttacaagaaggagcggtgttagcaggatatgctccacacacagaaaagatgctaagcaggtatcgagatggagaatcgattaagccacctgtttggtttaacggaatcgtaaggtcaaatgaaaccgtcattctttgcaatatgggggaaacatcagcttgtttggatatcaatgtgtatccaaagagcaatatggcagcgggaacaatcgagcttgcacagggtgttggcggacagaaggtatctttccctatggctgtaaaaaaggatgatgacattgctttatatgcatccactagggaatgcaaaaagaacggtgttcctgcaaaaaaggatggattctatcagtacagcgcagcttgggattcaaaacatatggttaaagttgaaaagggcaagactgcaagacttttgtataccatgcaggaaatgctgggaggggagcggttttaatgaacacacttgaaggaaaagaaatcatggtctggacatttatgggaaatgccagaatgtaccaagcacttcgtgattatggggaccgtatcagccagatcggtcttttttcatttaaggtaaaagcaactggagaaatatatgagagtggtgttgctatttcaaatatgcttacctacataaacaagtggccacatatcaaatggttgcttacgatatctaacgatggtacaaacagtatctttaaggcaatccgggataatacaaacggagcgcaggacaaattcttaacagaacttgtaagaattatgaagaagtacccttggtgtgatggtattgatatcgacttggaaaaaggggatgactattcaacccatgcagcttcaactgctttatttaggaatatctataacacggtaaaaagctatgatacatcaaaacttatgaatatatgcttgcctggtatgacaagtgttaatggttcggttggtggagagaactggtgcgtgtatgcagaccttaataattactgcgatacggcttcaatcatgagttatggtatggcatgggctggttctgcacctggtcccgtgtctcctagaagttggctagaaggaatatacgattatgcatccaaagttatggatagcaagaaggtgtttcttggaatgcctgcgtatggatggaactggcagatatacgatactccaaagaatatcggaaaaacctacagaggaacatccaatacctattatgcagcacaaaactggatgacggggaagtataactttacagacgataagccacctcaaccctttataccgattgttgcttattgggatgataacaataaggtgccttgggcattacctcatgtgtatgactacatggaagggcaggactatacggatcatacttatcctcagttatcaggaacctataatggcagacattatctgacggcatacagtaaacagcaggatacctcgtttggaacagtgtatgtagaccgtcccggaggaaatcctgataagaaatcaggaattgtatccttttcagatgatgttacaacactcggtgatgagggagaggcatcttttaattttactattggttctgcaggaacatacgatattgctattcagctttgttatccattttgggataagaacggcatttatgtaagcattgatggaaataagaaacatttctatgagagcagattgtggtggccgtattggaggagtacattctggacgagcctttcagataatatctacctttctaaaggaacacatacaattacgatttccgtggatgtaaaaggagtacagttctttggctttcgtgtatgttcatcctttagtgaaagaccttatgcgggagatgcgacctatctgttatctcctagaaagtttaaggatgtggaaggcaatatggtaggtcccgataggggatttaagctaacacttgagatgttaagaagaaagcctgattcagcactcatttggtatgaggactttcaagataatggaatgcttgaaaccaattactggacaacgctttctggtaaatggagcgtatggcgaagtgatgaatatgcaacggaaagagtgtattcacagttggatgggagcggacagttcgcatggaagtatgatggtttttctgacatccatttaagggcacgattagccttcccatcaaatggaagtggtaaggcaggtgtgttctgtggcagtctattctgttgccttaatatttcaaatcaaagggtggaattatataatggttcaactttgattggtagttacagtacatcgctatcaagaacaccagactctaaactgagaacagatcctagcatgtataccattgaaatgagaatcagaaatggtaaagtgcgagtttattcgggtgcatcctatactcttcgctttaccgctaatgttggcagtttctctggcgggtatgcaggatatcggtctgataatcgaactgtatgcgagctacttcgtatgggagatgcctggacgtatgagccatatgagtgttttgatgttgtaatgccggatggaactacaaagagtttcggacgtatcagcagaagtaattgctcttggaattcagagtttcaagtgttcaccttatcagctgatgtggaggagtcagctacaagaagtgaggacatatctcttgagtatgatttctttcattcccatgagatgacatcacttaaatgtggcaatgattactcggtaaagataataccgagggatataaatatttggatatcgagactgttcctaggtgatgcggatggtttttctattctttattaccaggatgtagacagtttggtttattgggctaatcaggctgcataccgatggaaactaaaaggtatgtgtatgtggtcactaggtcaagaggatttaagactttgggaatacctcccaaagcaaacatgataagaaggcggttgcttgtgtgagcagtcgctttttttataccaatttttaagaagggaggaactcacatgagtgatcacgtaagagaaatcattgcttggcttggagcacttggcatcccatccatttttgctatgactgcgtggtgtatcaaaagctgtattcactacacaaagcaattgagggtattagccagagcacagcaagcacaaatgaggtcacaactattggagcagtaccacttctacatggattccggctggatatcagaggaacacatggaggactgggaaaatcagtacaaggcatatcacagccttggcgagaatggaattttagacagcagaagagagcaactactaaagttgccaaacaagaagaaggaggaaggaagcaatgagtaactattggaagaattggataaaggcagcaggtatcagagccgtgaagacggttgcacagactgcgattgccacaattggaactacagcggttatgggagatgtgaactgggtgatggtagcaagcgcatctgcactcgcaggcatcttgtcattacttacaagtatagcaggtatcccggaagtgaaagagggtgatgagtaatgaaactcgtggagagtattcttacaaagaatccgtgttatacagccggaagaaagattgatgttaaagggttgatgttacactcggttggttgctcccaaccgagggcatcagcctttattaattcatggaacagtcctacttttagtagagcttgtgtgcatggatttattgatggaaatgatggtacggtgtatcagacacttccttggaatcatcgaggatggcattgtggcagttccattaacggaagtggcaataatactcatatcggagtagagatgtgtgagcctgcttgcattacttatacaggtggtgcgacatttaagtgttctgatgttgatactgcaaaggctgtagctgaaaggacttatagggcagcagtagagctttttgctatgctttgtcagaagtttgcccttgacccattggcagatggagtcattctaagtcataaagaaggtcatagcagaggcattgcatcgaaccacggagaccctgaacatttatggtcacagcttggaatgggatacacaatggataccttccgtaaggatgtagcagtaaaagctgcaatgggcaaccatgaagataatccgaatggaacacaggctagtgtatttgcaggactttcggaaaaggatgcagtttctattatcggtgaattgtgtcgtgaggatatgaagaagagtggtgttcttgcatccatttctgcagcacagttcattcttgaaagtggctatggcaagagcgaactcggacagaatgccaataatatgtttggtatgaagaaatcactgtccgggaacacttggagtggttctacatgggatggaacatccatttataccaagaaaacacaggagcagaataccgatggctcttatgaaaccatcacagcagatttcagaaagtattcatgtgtggaagattccgttgcagaccattctgcatatctgcttggagccaagaacggaaaggcgcttcgttataagggaatcaagggtatgacggactataaggctgtagcacaacttattaaggatggtggatatgcaacttcccttacttatgtagataagctgtgttctattatagagaaatggaatctgacacagtatgatgttttggaaacacctgcacctaaaccatcaacaccagatactgtcatgaagtttccggctacaccatttagtgtgaaggtaatcattgatgatttgaattatcgtagcgaaccatcaatgaatggagcggttaaggggcagacaggcaagggggtatttaccattgtggaagtaaatgacggatggggcagacttaagagtggagcaggctggatctggcttgaaaatccatcctactgtaccgttcagggtacggttacagaaacaccaaagacctcaagtaccaaattggtagacgagatagcaaaagaagtaatccgtggagattggggcaacggcgaggaacgtaagcagaaacttacggctgccggatatgactattctgttattcagaagaaggttaatgaaatattgaaatagtatttttacaggcttggagggagaaatcctttcaagcctttctttttttgtgtgtgtccagcaaagctggactacacttgccggtgtaagtccggtcacggtaatcgccagtgagccgtgtagctaaactcggtgcgttgtagtaatacagggtgctaagcgagtggataaagtaaccttgaaaaaggggcgagcaatcatgcagaccgtaacataaagtgaattctgccgtatcgttaaaaaggtctcgaaagagagaaaagggaagttgagccttggcaaaataggcgaaaaccatggaacgtgtggagaaactggaaaacagcacggaagaatccctcggtatagaggaaacggtatgtatgaaaagtgtagttcggaactggagagaccctacccattaccgaaaggtaaagagaaagcgtataagcttggcgaaatcgtatttctgatggaagggagtcggaggggaacatagtaccgataatgactgtgcaagaaaacgcagtttatgggaaggttccctacttcattcatgtttgtagagagggtaagagtgagggaatgtcatgcagactaataactccaaagaaaaagttcgacaacttcaaaacaaactatatctgacagccaagaagtgtgacagccgaagatttcatgcactttacgataaggtatatcgagaagatgtactttttgaggcatggaaacgggtaaaagctaacaaaggttccagtggtgtggatggtatcaaaatcgaggatgttgaagcgatgggaattgaaaaatacctgtcagaaatcaaatcagaactgatgaatggaaagtataaaccatctccagtaaagcgagttatgataccaaaaccagacggaagtgaaagacctcttggaataccaacggtcaaggacagaattgtgcaaatggctacaaagatagcaatagagccagtattcgaagctgactttagagaatgttcctatggattccgaccgaaaagaagtgcaaaacaagcagtggaagtagtaaggaaagcgtgtaacaacaagggctattatgtagtagacgcagatattgaaaagttctttgacaatgtaagccaaagctgaacgaaggtgaaatggagcagatacttgtatcgaatgcgcatgaaccacttgttagcagagaagattatgcgaaggttcaggaaaggctaaatagaagggcaaaggcagcacacaaccacggatatgaaaagactttctttgccggacttgtgaaatgcggtaagtgtgggtatgcctgcaaccatgttctttatcataggcaacctgcagacaaggcttatattgaatgtaacaaaagaaagaccaaggagtgtgatttacttcccatcagagagttggagttaaaaggcataatggagcagatagccgggtgcagggagaatgtggagcgaattacattatttgacggacacattgatttccttatgaaggacggcacagtaaagagtcacattaggaaatattcgggagatggatttaacaaaacgccattttcaagaaaaatcttctgtggatactgtggttcgagtattgtgcgaatgggtggcaataaaagaagaacctgttggatgtgtagtgtaaagaaagctgataaagccggatgtgagcatgaacttatgtcggatggagaactgtatggtgcagcccaatccatcctcggcacggaagaaaacttggatatggagatttatctacaaatcgagaaaaccatatcttacaatgacagaatcgaattttatatgaaggaaggaggcaaaaaggtatggcaaagacgataacgagaatcccggcatcggtcaacagatatacagcaaagccaatagcagagaagaccaagcgtagagttgctggctatgcccgagtttcaacggagcatgaagaacaggctaccagctatgaggctcagatggattattataccaactacattacttcccgtgatgattggatttttgtcgggatgtattctgatgagggtattacagctacaaacaccaaaagaagagaaggctttaatcagatgattgaggatgcccttgccggaaagatagaccttatcatcacaaagtcggtcagccgatttgcaagaaatactgttgattcccttacaacggtcagggaactgaaggaaaaaggtgtggagatatatttcgagaaagagaatatctggacccttgatgcaaaaggggagcttcttattacgataatgagttcccttgcacaggaggaatccagatccatttcagagaataccacatggggaaaaagaaaaatgttcgcagacggaagggcgagcattggatttaaacatttccttgggtatgacagaggaccagatggcgaatttatcatcaatgaagaacaggcagtaaccgtcagatatatttacaagcgctatcttgaggggtattccacatacaaaattgcctgcgaacttactgaaatgggagtgaagacccctgctgggaaagataaatggcatccaagttcagtgatgagtatccttcagaacgaaaagtacaaaggggatgcccttttgcagaagactttcacaaaggactttctgactcataagctggtagtgaacaatggagaagtaccacagtactatgtggaaggacaccatgagggcattgtgacagccgaccagttcgaccaagttcaggcagagattttaaggcgaaagggaatgcagaagtacagtggagttggattgttttcttccataataaagtgtggagaatgcggctcttggtacggagccaaggtctggcattccaatgataagtacagaaaggtcatctacagatgcaataacaaatatgctgatggctgcaagtgcaaaacaccacacatcaacgaggatgaactaaaggaattgtttatcaaggcggccaacgagttattttctgaaagggaagagattcttgccaacaccaaagttatgatggaaatggtctgtgaaacggattcccttgacagggatttacaggatagcatcacagaacttaatatcatctcggagcagatgcagattgccattgcagagaacagccgggtagcattagaccaggatgagtatgaaaaacgctatgccgaacttacggcaaggtatgaaaaggcaaaagctaagtatgatgacatcgcagagcagatagaaagcaagaaggcgaagagagaattatttaaaggcttcattcgaactttggagaagcaggatggcttaatggaagattttgatgccgggatttggagtagccttgtgcaggaagtgattgttaagaccaaggatgatataagattcatattcaagaacggatttgaagtaagagtatagaaataggatttgatggcactcaggcagaaatgcttgggtgtcatttttttgtggtagaaacataacagttattatgatattatattttattatatgagcgaaagtatatgctcgctaaaatttgaattttctattatctttcttagttttattaggattctggctttgcgtttgtttacaacgctctgggttatgcccaacctcgccccgacttcacgctcggaaagtccgtcaaaaaagattgcctgtatcagctcctgttcactatccgacagcaaaggcagggcggctttcagcctgtccaccatgaccgcattgacaacggtttctgcaatgtccaccgcttcatcagtgataaagtccagaggattcccctcgctgtccgtaaatccgtcgagagatagcagtctattctttgtatctaatttttgcagataacgccaccgttccttgtcacggtagaagtctgtgtattgctccctcacgacttcaagcagacagccttgaatggggataaacagcttgtccatataggtctggtcggattccctgcaacggcagaactccgtgtaggataattccacatagccgccactttctctgatatatacctttcttggtgcatatttcaccataaatacctcccatctgaatttttgaaatgtaaaaaatccagatggagaggcggagaacgacaccgcatatcagaaacagccctacggcactttccaacaaaaatcgacaaaagaaaaaccgcaaaggctctgtgacctttacggttataggaaatagtaattctattgtatggagattgtacttctactttcaaggtgagaagtaccgttgcactggcagaaatttttttaactggtttcctgccgttctctgatatgctatgtattgataaattttgcttcgtatgagcagatagataactgcccgaaaaaaggacataaaaaaatccctccaaatttaaaaacaaattcagagggtaatttagggtataacaaaataacccacccgaatatcgttttttttatttggtgagtttgttctttcaaatacgaaacaaaaagagccgatgattcgtgaattgttccacaatttcatcggctctgcgtcttaagcgtctggctctttgatgacagttatcttcaagttgtcaactttaatcaatctttcttgtctgcattttggacaataaaggggataattctccaaaacagtgtccttcctaattttattacgggttttgctcccacaaacaggacacaatatccattcgcatttcatcataattagtctctaatcctttcaaatctcattttatatgacttttgcaagctgttaagctaacttgtggaacatatgccgaaccttatctatacggctattcgggcggcggggttggcaaataaatttaccaatagctggctggtatccttttaactctgtcaagcagactccctgcccatttgtgaaataagttaaatcgttcctgtattcttgaatacatctagcagggatttctcctttcagaatgacctcgtcattctttatctgagtacttacaatatctgcacaataccttggagcatcatgatacgcccgtgagagatattcctgcggtgcataaatttcaaagtggagatatggctctaatagttctgtccctgctttttttaaagcctgctccaatacgataggggaaagcagccgaaagtctgcgggggtacttacaggactataatacaatccatattcaaaacagattttacagtctgtcactttccatccatacagcccctgctcgcagccataaagaaccccctccataaccgcattttggaacgattgatttaaatatccaagtgaaactctgctttcatactgcactccgcttccaatagggagcggctctatggacaacccgacagaagcccagaaaggatttggcgggacttctatgtggatggtatattctgcttttctaagcggtctttccatatatataacagtaggctcttttatttctgcctccacatgatatttttcctcaaggatggcacaaatgacttccatctgcacattccccaaaaaagaaagtataatctcatgcgttgtagtatccacataatattttaaaagagggtcgccatctgaaatttctgtaagtgccccaagcaatatttcccgctgttcagatttctttactgcaatcgttgtttggagcatagggagaggattttcaataaattttctctgcggcaacagtatttcgttccccaaaatactgtttagctgcaaaacatcatttggtaaaattacaatatcaccagagcaggctgtatcggatgaatataattcaccgtttgtcggaacatacatctctgtgatttttattttctctttttcagatattctaataacatccctcaaatgcaatgttccgctatatatacgcacataaacaaaacgccgccttttctctgaatattcaatcttaaaaacctgcccgcatagttcagattgaccttcaggcgttgatgaataaaatttactggcaattacttctataagctgccgaatccccagattgtttttagcgcttccgtgataaacgggaaataacgttccgttttggaatctcctgttttcttcctgttccagttctgacattttaaacggtttccctgacatatatttctctaatagttcatcgtttcccataattaccgcatcccactgttccatatcgtcattgtccgttacatttatatggggatgctgcccaaccttttgcttcactataatttccgaagaaagctttgctttcatttcccgatataccattggcaaatcaatcccctcttggtcaattttattgatgaaaaaaattgtcggaatcttcattatctgtagtgcatgaaacagtatacgggtctgtgcctgtatgccatcctttgcagaaactaataatactgctccgtctaatacggataaagaacggtatacttccgccaaaaaatccatatggcctggcgtatctataatgttgacttttacatcctcccactgaaaagatgtcactgctgtctggatagtgattcccctttgacgctccaaattcattgtatctgtccttgttgtgccttcatctacgctccctagttctgcaattgcaccactggtatacaataaactttccgttaatgttgtctttcctgcgtcaacgtgagccagaatgcctaagttaattattttcatgtgattttcctcctatcaacacccaaaaaagggcataaaaatacccagtgataaatactcctatcactgggtaaataactccaatagccccaaaacacttatatgttttcgggcatataaaattacatgataaaagtattcttaaactgggtacaaaaaactaagccccatattaaaagtgaaacgggactgctactttttgttcccactatcaaattgacagtttatttaagaataccttgccgcatatttattaactccttgtataatactgaatctaattatattccttaaccctttatttgtcaagctgacaaactaaagcagaaaaagcggcaggatttccccctgccactaatcatctgtttatgcaaaaataatttccttttccacaatctccctcgcacaagcccttatgttattgaggcatcctgtccattctaaggcgttttctgcctttagctgttccgttatgccctgtgcctgtttcataccctctatgagcctttcaaagcgttcctgtgcctgtctgttgatgtcggcaaggtaggcgtttagcctgccgcttgtaagaagattggtgtatgtaactttacggtactgttttagataatctaaatgccgttgcccccagatgcctattgcctgttcttcttcggcgggtacagttaagcacggtatcaaataatccccttgcctttcgtatttgccgcccagttcctcaaataatgattgtacaatagacaactatttatctttaccggaaggaaatacatatccaacaatagaggaactattgacacatacttcaggctataaaggatattatttagaaagtcctatggtttctaacttttttaatggtagaaatgatttttatggtgttacaaaagaaatggtttctgacaaagcaggaaacttgaatatgaataaagcaagttatgatttcgtatattctaattatggttatgcagtattaggacttgttcttgagtcagtatatgaaacggaatatacaagcttgttaaatgattttgcacaaaatgaattatgtttaacctcaacacagatttctgataaaagcggagaccttggaaagtattgggattggaaagaaggcgatgcatatttgtcagcgggagctgtcacatcaaatattgaggatatgcttttatacgcacagatgcaacttgaagataattcatatttttcagattgccataatagcctgaaaagcattaatgcatcaaccgaaatgtataaaaccatgggtattcatatggatgagataggaatgtcttggattcttgatagtaagaataacatcatatggcataatggtggtacaggaaattataatagctatcttggttttaatcccgaaacaggtacagctgttgttgtgctttcaaatctcgccccgaattatagagtcccagctactgtattaggtgtaaaattgttattagaacttgataatgagaagtgaaactttcagtttggacctttgttaaggatactgaatttaacaagaaataatgcatttagtaggggtgttcaaatgaacacccctttgaacaccccaaatggtacaatcgttaagattgtatcatttttattgtcctaacgaaccgttatggtcatccacatgaagaaacgctggaacggttaaaaagcagaaactgtcaggtttattcaacacagcagtgtggagctgtcacgatccaaagtgatggaaagaaactgtttttcagcagaaaatgtggtggcggtggcagtgactgaggaaaaatatcttgcgtgatatcccttgtcaaactgtctgtttatcttatataatagaagagctatgaaaaaattgaatgaagattttaagagtggaaaatttgagcaggtatatcttttatatggtgaagagggatacctgaagaagcaatataaaaaacggtttatcaaggcgatgatcccggagggcgatacgatgaattatgcccattatgagggaaagaatattccggtcaaagaggtgattgatctggctgagacgatgcctttttttgcggaaaaaaggctcatcgtatttgaaaataccggatttttcaagactgcggcaggagcagaactggcagattatatcaaagagatgccggagacaacctattttatttttgtagaagaggaagtcgacaagcggaataagctttataaggctgtgaatacaaaaggatacgcagcggcactgaccatgcaggatgaagaggtcctgaaaaggtggatcgggcagatcttacgcagagaaggaaaagaaatgtccggagcgaccatctcttatttccttggaaaagtcggaacggatatggaaaatatccagagagagctggagaaagtcatctgctatgggattgacaaagctacacttaccagggaagagattgatgcagtgtgtgtaacgcagctttccaaccatatttttgatatggtggatgcggtagcgacggggaatcagagaaaggcactggatctttattatgagctgatcgcactgaaagaaccgccgatgcggattttgtatatgctgacgaggcagtaccgaagcctttattttgtaaaagcattgatgaatcaggggtatgggaaaaaagaaattgcatccaaagccggactgcatccgtttgtagtcgggaaaagtatggtgcagtgtaagcggttcaggatgggacagctcaggcagagtatggaagaaggtgccggactggaacaggctgtgaagaccggaactttaagtgaaaatctggcggtggagctttttatagtgaagcagtcagaaaagagataagagcggagcagaatgaggtgtagccggaacggcgtgataacgtgtaagcagaacagggaataaccagaaagaaataaaagagacagagataagatggagggcgaacattgtcaacgattgatcagaatcatataaggaacttttgtatcattgcacatatcgatcatggaaaatccacactggcagaccgtatcattgagatgacgggactgctcacaagccgtgagatgcagtcacaggtgctggataatatggatcttgagagggagcgtggaatcacgatcaaggcacaggcagtgcgtacagtttaccgggcagacgacggagaggagtatcttttcaatttgattgatacaccgggacatgtggattttaattatgaagtttcgcgaagtctggcggcctgtgacggagcaatcctggtagtcgatgcggcacagggggttgaggctcagacgctggcaaatgtatatctggcactggatcatgatctggatgtgatgccggtcatcaacaagattgatctgccaagtgcagagccggagcgtgtaaaagaagagattgaggatgtcattggaattgatgcggaagatgcaccgttgatctcagcgaagacaggactgaacgtgcatgaagtcctggagcagattgtgaaaaagattccgtcaccggtaggagatccggatgcaccactgcaggcactgatctttgattctaaatatgattcttataaaggagtcattgtcttctgcaggatcaaagagggaacggtcagaaagggaactccgatgctgatgatggcgaccggggcgagagctgaggttgtggaagtcggaacatttggtgcgggacagttcattccatgcgatgaactggaagcaggaatggtcggatatattacggcaagtctgaaaaatgtaaaagatacccgtgtgggagatacgatcacgaatgcagagcggccatgtgctgaaccattgccgggatataaaaaagtaaatcctatggtttattgtggactgtatcctgcagatggagctaaatacccggatctgagagatgcacttgaaaagctgcagctcaatgatgcagcattgcagtttgaggcagaaacttctgttgcattgggatttggattccgttgtggatttttaggactgcttcatctggagatcattcaggagcgtcttgagagagaatataatctggatcttgtaacaactgcaccgagtgttatttataagatccataagacaaacggggaagttattgacctgacaaatccgaccaatatgcctgatctgtcagaaattgaatatatggaagaaccgatggtaaaagcggagatcatggtaacatctgaatatatcggagccatcatggatctttgtcaggaacgtcgcggagtttatcagggcatggaatatatcgaagagacaagagctgtgctgacctatcatctgccattaaatgagattatttatgatttctttgatgcattgaaatcgcgttccagaggttatgcatcctttgattatgaaatgctgggatatgagcgttcagaactggtgaaactggatatcctgatcaataaagaagaagtggatgcactttcctttattgtttttgagggaagtgcttatgaacgtggaagaaagatgtgcgagaagctgaaagaagaaatcccacgtcagctctttgagatcccgatccaggcagcagtcggaagtaagatcatagcacgtgagacagtaaaagcaatgagaaaggatgttcttgccaagtgctacggcggtgatatttcccgtaagaagaaacttctggagaagcagaaggaaggtaaaaagagaatgcgtcaggtaggaaatgttgagattccgcagagtgcatttatgagtgtcctgaagctggacgataactaaaaaaagtattgatctgaagtttatatgaatttatgaataatatgaaaaaaagagatttggaactgtatcttcacattcctttctgtgtaaaaaaatgcaactactgtgattttttctcagcagcaggaagcagagaagagcaggaagcatatgtgcaggcaatgatacaggaaatacgcggttataaagacagtcttcactcttatgaggtgaagactgtctttctcggaggaggaacaccatcccttctgtcagaaaggcaggcagaagagctttttcaaagtctgtatgatagttttacaattcagaaagatgctgagatcacgatggaagtgaatcctggtacagtgaacctggaaaagctgaagcagtataaagcagtaggtgtgaaccgtctaagtcttgggttacagtcagcccggaatgaagaactgcaaagactgggaagaatacacacgtatgaagatttccttgctacgtggaactttacagaaaaggcaggatttgagaaccggaatattgatctgatgtcggaacttccgggacagacgatggagtcatgggaagatacgctggaaaaagtgatcgctcttgaaccggagcatatatcggcatacagtctgatcctggaagagggaacaagattttatcattggtatcaggaaggaaagtttgattccggtgaatggaaactcccgtcggaggaagaagaatatcggatgggggaatggacaatagaacggcttgcaaaggcgggaatggaacgttatgaaatttcaaattatgcaagaacaggacaggaatgcaggcataacctggggtactgggacagagtggagtatcttgggattggtgcaggtgcatcctctcttctcagaaacagaaggttttcacatataaggaacagaaagacttatatagaagcaatccatgaaaaacaacccattgaaacagaggaagaacttttgtcagaagagtctcagatggaagaatttatgtatctgggcttacggaaagtgaatggaatttcaaaagaaaaatttgagcgaacctttcagaaaccgatcagtgaagtatatggaactgtcatagaacacttccaggcagaacatttattagaatgtaagggagatcgcatttttctgtctcgcagagggatggatgtaagtaattacgtgctggcggagtttttgctgggagaataaatttgtagttgttgggatgatacgcttgtaaagcaaaagacttctttatggcgaagcggacgcggaaagcagggatattccttcgcggtgcaggcccgctttacctcagcccgttgaccgtttgtaactcgaaagtggaaatcttcgtgcaaaggcactcgatttactttctctaacaaacgctgcaaagtgtcttcggaacgctcctgctaatgcacctgctcaggaacaccctgctttccgctggtagtcacagcaagaagtttttttctgactccacagcgtagtcactcaacaatacaaatttcaaaaggatagaaaaagccggatggctattgactaagatattcgatcgtaaatattagacagtagatattgtatttactatttgactaatcatttatcttagttgatagccttccggctctttagttcttattgaaatttcgtatttgttgaaagaaaatatcctgatgcgaggaaagctttctgacttgaaacgcccaatatccacacttgttgttgcgtgagcagtgcattgacagggagcgttccgaagacactttgcccaacttgttaaggaacgtaaacaggagtgcctctgcacgagtgtttccacgttcctgttacaagttgtcaacgggctgaggtaaagcgggtcctgcactgcgatgcaacaacaagtgcggatatggacgctcttctgtcaaaaaccttcctgcttttgggctattttccgttcgacaactacaaatttttgagaatcactgttgacaaacggaaaatgaggtgctatcttattatctgtaaggtgttagcactcaaaagtagagagtgctaataagctgaaagaaagagagtcagagaatgggaggaagagtgatggcaatggatgaagcattgacagaaagaaaacttactatattaaaagctatcattcagaattatctggagaccggtgaaccggttggttcaagaactctttcaaagtacactgacctgaagctcagttcagctacgattcgcaatgagatggcggatcttgaggatcttggatatattttccagccacatacttctgcagggaggataccgtcggataaaggctatcggttctatgtggatctgctgatggagaaaaaagaacaggagatcagtgaacgtgaggatgctcttcttgagaagactgacaaagtagaaaaagtattgcagcaggcagcaaaagttcttgcctccaataccaattatgcgacgatggtttcgactccggtcaacagtcgcaatactttgaagttcattcagctttcccaggtggatgaagagcagatcgtagcggtgatcgtactcggtggaaatgtaattaagaataaaattattgaagtaggcgaaaccttaagtaatgagaacctgttgaagctgaatatgcttctgaatacaacactgaacggactgtcgatcgatcagatcacattggggctgatcgccaggttaaaagagcaggcaggaatccacagtgaagtgatcggacacgttctggatgcagttgccgagattattcatgtagataatgatatggagatctatacaagtggtgcgacaaatattttcaagtatccggagttgagtgataagcagagtgcacaggagatcatcagtgcttttgaagaaaagcagcagttggcagatctggtgacagagacgcttgccagtgaggaaaatcacgggattcaggtttatatcggagatgaagctccggtgaagacgatgaaagactgcagcgtggtaacagccacatatgaacttggagaaggcatgaagggaacgattggaattatcggtccgaaaagaatggattatgaacatgtcatgaagacgctgaagaccctgcaaagtgagttggatgcgatttataataaagaaccaaaaggatagaaaggtagaaagctggtgacagagaacatgagcaaagaagatatggtgaaagaggctgtagaagaggcgaaagcaaaagctgaagcagaagaaaccaatgctacaacggcagaggcagaggaagctgctgaagcagaagcaaaggaagatgccgaagatacagcagaagccggagaagaaaccggatctgaagaggatcagggagaagaaaaatccggtgagaaaaaaaagttcttcggaaagaaaaataagaaggacaaaaaagacgagaagatcgaagagttaaatgatcgtatcactcgtcagatggcagagtttgataacttccgcaagagatcagaaaaggaaaagtcccagatgtatgagatcggtgcgaaagatatcatagaaaaaattcttccggtcgttgacaattttgaacgtggattagattccataccggaagaggaaaaaggttctccgttcgcagaaggaatggagaagatctacaagcagcttatgacgacactggattcacttggagtgaaaccgatcaaagctgtcggtcaggagtttaatcctgatttccacaatgcagtcatgcatgtggaggatgaagaattcggcgaaaatgttgtcgctgaagaatttcagaaaggctacatgtaccgtgagagtgttgtaaggcacagtatggtaaaggtagcaaattaatttgagttttatcaaaaccagagaataaatagaggaggaaatttatcatgggaaaaatcattggtattgaccttggtacaacaaacagttgcgtagctgttatggaaggtggacagcctacagttatcgcaaatacagaaggtgcaagaacaacaccgtctgttgtagcatttacaaagacaggagagcgtctcgtaggagagcctgcaaaacgtcaggcagttacgaacgctgcaagaacgatctcttccattaagagagagatgggtacagattataaagtagatattgatggaaagaagtattctccacaggagatttcagcaatgatccttcagaaattgaaagcggatgcagaaggatatcttggagagaaagtaacagaagctgttatcacagttccggcttacttcaacgatgctcagcgtcaggctacaaaagatgccggtaagattgcaggacttgatgtaaagcgtatcatcaacgagcctacagcagcagctcttgcttatggtcttgacaacgagaaagagcagaagatcatggtatacgaccttggtggtggtacattcgatgtatctgttattgaaatcggtgacggagttatcgaggttctttcaacagcaggtaacaacagacttggtggagatgacttcgaccagaagatcacagattatatgctggcagacttcaaggcaaaagagggtgtagatctttcaacagataagatggctcttcagagattaagagaagcagcagagaaagctaaaaaagaactttcaagtgcaacgacaaccaatatcaaccttccgttcatcacagcaacagctgaaggaccgaagcatttcgatatgaaccttacaagagctaaatttgatgaactgacaagagatcttgtagagaagacacaggagccggtaagacgtgcactttctgatgcaggtatcacagcttccgagcttggtcaggtacttcttgttggtggatcaacacgtatcccggcagttcaggaagaagtgaagagactgacaggcaaagagccaagcaaatctctgaacccggatgagtgtgtagcacttggtgcttccgtacagggaggtaaacttgcaggagatgcaggtgcaggcgatatccttcttcttgatgtaactccactgtcactgtctatcgagacaatgggtggtgtggctacaagactgatcgagagaaatacaacaattccgacaaagaagagccagatcttctctacggcagcagataaccagacagctgtagatatcaacgtagtacagggtgagagacagttcgccaaggataataaatcactcggacagttcagactggatggaatcccgccggctccacgtggagtaccgcagattgaagttacattcgatattgatgcaaacggtattgtaaatgtatctgcgaaggatcttggaacaggtaaagagcagcatattacgatcacagcaggttctaatatgtctgatgacgatatcgataaagctgtgaaagaagcagcagagttcgaggctcaggataagaaacggaaagaagcaattgatacaagaaatgaagccgatgctatggtattccagacagaaaaagcaattcaggatgtcggagataaactggatgcagcagataaggcagccgtagaagctgacgtacaggcattgaaagatatccttgcaaaatctgcaccggaagagacatctgaggctcaggttgcagagatcaaagctgcaaaagagaaattgatggaaagtgctcagaagttatttacaaagatgtatgagcagaatgcagcagcaggagcacaggctggtcctacaccgggagcaggtccggcaccggaaagttctgcaaatgatgatgtagtagacggagattacaaagaggtttaatctgattcatgtaatctgaaagatttacatcagaaaagtatgaagaataaaggattctacgaagctgtaggaatatagcttcgtagaatttcttgaggttatagaaaggtaaagtagttgtattatggcagaggcaaaaagagattattatgaagtactcggcgtaagcaaggatgccgatgatgctacaataaaaaaagcatatcgtcagcttgcaaagaagtaccatccggatatgaatccgggagataaagaagctgagaaaaagttcaaagaggcttctgaagcctatgccgttctgagtgacgctgacaaacgtcgtcagtatgatcagttcggccacgcggcatttgagggaggtgccggaggtgcaggtggatttggcggcggatttaatggagctgattttggagacattttcggagatatctttggagatctgttcggaggtcccagaagaggcggaacaagtaatggcccgatgaaaggtgccaatatcagaaaaagtgtccgcattacgtttgaagaggcagtacatggatgtgaaaaagagctggagctggttctgaaagatccatgtgaagactgtcatggtacaggtgcaaagccgggaacttctcccgagacttgtccaaagtgtggtggaaagggtcagattgtttatacatcccagtctttctttggtactgtacagaatgtgcagacctgtccgacctgtggcggttcaggaaaagttgtaaaagaaaagtgtccgaaatgtgcaggaaccggatataccgcaagtaagaagaagatcaaagttactattccagcaggaattgataacggacagagtatccgtattcgcgaaaaaggcgagccgggagttaatggcggtccgagaggagatctgcttgttgaggtaaatgtatccagacatccggtattccagcgtgtagatatgaatatcctctctacagtttcaatatcctttgcgatcgcagcacttggtggagagatcaagatcccgacagtagatggagatgtagtctgcacgatcaagccgggaacaaaaaccggaacaaaggtacgtttaaccggaaaaggtgttccgtcattgagaaattcacaggtcagaggagatcatctggttacagtagtgatccagacaccggatcatctgagtgcagaagcaaaagaagctctcagaagatttgatgagttgacaggaaatacactgaaacgcagtgaaaatacagaaaccgcagaggacaaaaagtcaaagaagaagtctttcaaagaaaaagtgaaagaagtttttgaagataaagaataaaaagtcctgaatagtgagttaaggtttcaggcagaaagaatggcagaggaaaagcaattttccctgccattctttgaaattatttaagtggaatcccgaatagatactatatttaattgatgttggggtcaaaagcccccaacaatgatgccaacggattgtttcgtgctacgcactcccacaatcctacccgctattcgcatatcatggtgcttacgccccacttttatgctcatatcggggcgggtctcaaggtcattctaccaccagtgtgcaagcacacgtggtttcagaccttttgaccctgacatctttaatttctttcccccacaaatacaataacagaccgttctccaagcagaacggaggaaccggcagcaggtatttcagaatccgtgaatgtctgctgttttttgtctcctgtattgacggcaatcttccaggtatagccgtccgggagctgaggcagagtcagagcagcggaacaccagtgtgtattcacggcaaggaagaccagatcttctttgtgcaaagagtcatcataacctgaaaagagaacgcaggcagtgtgactgctttccggcaggtcaggtttccatggagtgagaccatgaagactcatggacggaaaaccgagataactaggctcaaggtctttgcggatacaggcatgagcttttctgaagtggatcatataacggaaaaactcatacaatgctctgttcttctctaaaagtgaccagtccagccaggagatcagattatcctgacagtagggattattatttccatagcgtgtatcagcaaattcatctccggcgagaaacataggagtgccacggctgcacatcaggacagcacaggcattcatcatcatttttctgcgaagagccaggacggaaggatccgttgtatctccttccacaccacagttccaactgttgttgtcatctgcaccgtctgtatttccccagccattggcttcattgtgcttttcattatagctgtagagatcgtaaagcgtaaatccatcgtggcaggtcagaaaattaacagaagcattcctgccccggaaaaccggatcataaagatcgggtgaaccggtgatccggcgggcagcagcctgggaaagaaaatcatctcctttcagaaaacgacgcatatcatcccggtaacgtccattccactcagcccagcgtttccaggagggaaaagatccgacctggtagagtccgccggcatcccaggcttctgcgatcagttttacattttcaaggatggaatcaaaagccagactgcggagaagcggaggctggtgcagaggagttccgtcctcgttgcgtccgagaatggaagcaaggtcgaaccgaaacccgtcaacacggtattcgatcacccagtaacgaagacagtccaggatcatattttgcactacgggatgattacagttgagcgtatttccgcagccactgaaattataataatgtccatcgggagtgagcatgtagtaaatctggttgtcaaagcctttgaaagaaaaggatgggccaaattcatttccctcggcagtatggttaaaaaccacatccagaatcacctccatgttctggtcatgaagttctttgatcagacttttcagttccattccctcgcggttgtactctttagaagagctgtagctggtatttggtgcaaaaaagctgaccgggttatatccccagaagtcgagcagcaggttttcatcaataagtcgtgcatcccgcatttcgtcaaattcaaagaccggcatcagctcaacggcattgaccccaaggcctttcaggtaaggaatcttttctttcagaccgtcgaaagtaccgggatgtttcactcctgaacttgcatcctttgtgtagccgcggacgtgcagttcataaatgatgagatcttccatcgggatggaagtgtgacgctgctgcccccagtcgaagttagaatgaacgacacgtgcccggtagccatgttgcggattatttttatggccccagtggctttgcccggttacggcacgggcataagggtcaagcaggactttggtacggtcaaagcggagccccatcttctcgtcataaggtccgtccagccggtaagcatattcaaattcttcaatgtcgagaccaaatacgatcatggaatagcagaatccgatgcggtaattatcaggaaatggaagaacggcaaagggctcttccgcttcccggtggaacagtaaaagttcgcaggaggttgccttatgcgattgaatcgtgaagttgactccaccagggatcacggttgcaccgaaatcaagaaaaaatccgggacgcacctgaaatccgcagatagtgtctaagggttttaattgtccggcagggacaagaacaagatcggtctgattattttgcaagatcatttcactccttctatctataagttacagtgtttaagatgcttttgaccccgacatctatttataggataattatagaacagaatctttgaaatgcaagatgaaagtggtatactgtaacaacagagaaaaaagagtgaactgttcaatatcagtggaagaacagggatcatgaaagaaagaggtaagattatgacagaagaacagaagacggaaggatgttcagaatcggcttgctccagttgctcacaggcaggttcctgcagcagtaagaaagtggatctgcacgagccggcaaatgcacattcatccattggaaaagtcattggagttgtcagtggaaaaggaggcgtcggaaaatctcttgtcaccggctcacttgcaaggcagatggtgaaaatgggatacaaggttgggattcttgatgcagatattaccggaccttccattccgaaaatgtacggtattcatgaaaaagctcagggaacgcaggaaggtatccttccacggattgcaaaagacgggacaaagatcatgtcagtgaacttgttgcttgaagatgaggaggctccggtgatctggcgtggaccggtgatcgcaggggttgtgaagcagttctggacagaggttatgtggggagatcttgattatctgtttgtggatatgccaccgggaacgggagatgttccgctgaccgtattccagtcacttccggtcgatgggatcgtgatcgtgacatctccgcaggatctggtcaaaatgatcgtgaaaaaggcgtatggtatggcaaagcagatgaatattccggtgcttggcattgttgaaaattatagctatatcctctgtccagactgcggaaaaaagatccacattttcggagaaagccatattgatgagatcgctgcggaactggaagtgccggttcttggcaggatgccgttagatgcagcacttgcagaggtcgtggaaaaagaagcattttatgaagcagagaatccttatctggaagttgaggtcttatagagatgaaaggacagagaacagagatctggaaaaaagaagaatattcttatgaaggagctcatggatttattccggtgatggtcagttatatgcatgaggatgataagatccatccggctatgatcgttgttccgggaggtggataccggcaggtttcacggacagaagcacatctggttgccatggatttttacgaggcagattataatgtatttgtgcttgtctatacagtgaatccgctggatgaagttccactgggaatgcagcctcttcaggatatttcaagagcaatccgcatgatacgcgggaaagcagaagagtaccggatcaccccggagaagatcgcagtatgcggattttctgcaggagggcatttatgtgccagtttaagtgtgcattggaaggatataaaagatccggatccggtatatgaccgggtgtccaaccgtccagatgcagcgattcttgcttatccggtcatcactgcaggaaaggcggcacatccaggatcttttgtcgccttattcggggagaacccggatcagaaggatctagattatatgtcacttgaaaagcatgtgaccgcagatacgccaccctgctttttgtggcagacagcaacagatgagtcagttccggtagagaacagttatctttttgcaaaggcgtgtaaagaagcaggtgttccgtatgctcatcacgtattttcagatggtgttcacggaatgtctgtagcgacagaagactggctggaggaaagaggcagagaaccttatacgatggagcagatcagactgcttggcgaagcaatcctgagaggtgaaaccaggtttgagaaaaagaccggtgaggagctgcttgcgaagtatggaatttccagacctgcaccggaaaaatggagtcgggatgagaaagaacacttgcggaaggttttaaaagaagttggtgcatggaggatgcttgcaaagtgctggcttgcagcagtatgggatgtgtaggaaagtaagaaaaagagagaacgacaaagctgataacaggaagtgcaacagaaaaagcggaaggagaacaggatgagaattttattgatccggcacggagacccggattatgaacatgataccttgacagaaaaaggacgcagggaggcagaactgctggcaaagagggcatcatcgcttgcgatgggaagttgttatcagtctccccttggcagggcgatggatacggcacagccctgtctgaaagcgacgggaaaagatgcggaagtactggagtggctgcgggaatttccggcacagctggatctgaataaagatccggaattgagccgggcatatccgggagcaaaaatggcagacggaaagtatctgataaggaatgtatgggatatggcaccgggatactggacagagcatgaagaatatatggatcgcagggaatggagaaattccaaggtggcagaatgctctgatatgaaagtggtttatgaccgggtgatccgggagtttgatgcatttcttgcagagcatggatatgtgagggagagaaatcattaccgggtagaaaaagaaagtacagagacggttacctttttctgtcattttgcgatcagctgtgtattattatcccatttgtggaatgtttccccgtttgtattatggcatgggctggtgcttgcaccgacttctgtgaccgaggtggtaacggaagagagagaacagggaattgcgtatttccgcggtacaaaagtaggagatatttcccatttatatgcaggaggggaagaaccggcttttgctgcccgtttctgtgaagtatacagcaatgaggatcagagacattagaggagtgtgcttatggaacagaagaaaaagcaggatcataaattttatggaggattccggtatgcgatcgaagggattctgaccgggattcgtcaggagcagaatatgaagatgcactgtatcatgacagtgctggtggtgctggcgggatttttctttgaaatttcgaagatagaatggtgtatctgtctgcttttgtgcggactgatcatggcactggaactggtgaatacatctgttgaggcagttgttgatctggtgacggagaaaagaaaaccgctggccaagatcgcaaaggatacggctgccggtgcagtgctgatcgcagcacttttttctgcagtgatcggttgtattatttttgttccaaaaataatggaatggtttacatttttttgaaaaaagtgtataacaagagtataaaatcagataatgtaaagaggcttagaaccttgaaaggagcagaagagtatggaaagattgacggatggtctgaaaaagatcttattggcaggaatcggaacagtagctgtgacggcggagaagtcaaaggacgtgctggatgagcttgtaaaaaagggtgagctgacagtagagcaggggaaagtcctcaacgaagagctgaagcataatatcaagaagacggtcaaggatagtgtgaatgtatcagtgaaagcatcctcaccggaagaactgacagagcttcttggaaagatgacaccggagcagttagagcagttaaaagagcagctcgcaaagatggaaacggcagaagctgtggacggagagtcagaagacggagtgaatgcagaggcagaagcagcaacaaaagaaactgctgaaacagctccggaaaagaaagatgaagaatgaaaagtcgggttccagattaaaagagataaccgcagttttaagaaagcatgagctgacccgggggatcacaccggagaagttgcggctgattcttgaagatctgggacctacttttattaagattggtcagatcatgtcactgcattcagatgtacttccaaagaagtactgtgatgaactgatgaagctgcggtccgatgtggctccaatgccattttcggaagtggaggaagtgatcgaagattcctatgggtatccatggcaggaggtcttttcacaaattgaaaaggagacattaggttcagcttccatcgcacaggttcacagggcaacgctgaagacaggagaagaagttgtcgtaaaggtgcagcgaaaaggaatttacgatacgatggcaagagacattggtcttctgcataaggcggtcaagcttgtaccaccgatcagcatcaaagaaaccatcgacttcagtatggtgctggatgaattgtgggtcgtaacgcaggaagagatgaatttcctgacggaagcagccaacatggaagagtttgcccgacggaataaagatattgcgtatgtaaggacgccggttttatataaggaatttacaacgcatcatgttctggtgatggaatatatcgaaggatatcctatcgatgaaaaagaagtgcttgaaaaagagggctacgatctggaagagatcggaacaaagctggttgaccattatatcaagcaggtcatggacgatggctttttccatgcagatccccatccgggaaatgtacatatttcggacgggaaaattgtatggattgatatgggcatgatgggacggctttcagacagagacagagaactgatctccgatgcgatccaggggattgcgatcaatgatatcgggatgatccaggatgcggttcttgcgttgggagaatttcggggaaaaccggatcagagtaagctgtatgaggatatcagcagcttgatgatcaagtatggcaagctggatatgggaaatatcgacgtggcagaggcaatgcaggatctgatggaagttatgaagacgaaccggatttctatgccacatggtctgacgatgctggcacgcggtctgacgcagatggaaggtgttcttgctgagatctgtccacagatcaatatggtagagatcgcttcagcaaggatcaaaggtgatttcctgcggaattttaactggaaaaaagaattgaagtccggtggaaagaacctgtatcgagcgatccataagacgatcgagattccgtcactggcagcagatgcactgcagggatatatgaaagggcagacgagggtcaatctagatcttcatgtatcaaaggatctggcagagctgttaagaagactggtgagaaatattgtgatgggactgtgggtcatggcacttctgatcagttcaagcatcatctgtacaacgaatatgaagccaaagttatggggaatcccggcaattggtgcgatcggatatctgatggcattcgtgatcgtgatgtatgtatttatcaagcattttttgtcaagaaaataaggaaaaagtaatcaccgtataaaaggacagaacctttttatacggtgatttttttatagcaggaaagtatacatttctgaagcattctgaaatcgttaaaggaatccgcaaaagaaaagacgatcgtactggtttccaacagagattccaccatgaatgttgcagattttgtatatgaaatggaaaaaagaaatagttcacttgcaaaatgaaagaaaatctgttagagtactacaggtaattaataagacagttcgtgaccatcctgtctataaaaaaaactagggataaaagttgtaatttaagatctgtgagatgctggtcctatctcttttcagtccggtatcgttacgatttacaggagatgtctctcggggtcagtaccgtcaggcatctcctttttcttgaaaattcattttcattttcccggggaacagagttggcacgcatcaaaagaaaaagaaagaagggtgaagatgggacagacagaaaatccagttcgctatagtattataacggataaaaacccaagggagattgttatgctccggggaagcggatgccgttatctgcggtgtcgtttctgtgattatcatttggattcttccagaaatgaagaagaaaactataggatcaacaaagaggcactttctaaggtaaatggcatatatcacagtcttgaggtaatcaattccggaagttttctggaacttgatgaaaagacaatggaagaaatcaggcgggtctgtaaagaaaagcagatcagtcagctccggtttgaggtccactggatgtatcataagcatgtacagaagtggaaggattattttaaaaagcagggaatcacgctgaagattaaaatgggtgtggagacatttgatgatacgttcagaagagaagtctttgacaaaggaatggaaggcgttatgccggaagagatcgcaggagtggcagatgaagtctgtctgctttttggaatcagtgggcagacagcagaatccatgcagaaagatatagaaacgggattaaaatattttgaacggatctgtatcaatattatggtggaaaatacaacaccgatccgtccggatcaggaagtgatccgactttttgtggaacagatttatccgaaatataaagaaaaccaaagggtggatattttgcttcaaaatacagattttggagtcggaggagaagaaaaggagaaagaagaaaatgaatgagatattattggttttaagtcttttggttatatatggaagtgttctgttagtttacagattatttgggaaaagcggattgtattgttttacagcgatcgctacgattaccgccaatattgaagtgctgatcatggtggacgcattcggaatggagcagactctggggaatatcctttttgcgtcgacatttcttgttacggatatcatcagtgaggtagacgggaaaaaggcagcacagaaagcagtaaatatcggaatttttacgtcggtattttttatcgtagtttcccagtcctggcttttatacagaccgagtgcgagcgactgggcacagccggcgatcaaagagattttttccaatacaccaagactgatgatcgtcagtgtgctggtttatgcaatctgtcagcggtttgatgtatgggcttatcataaatggtgggcgattaccaaaaagcatttcaatggagattcaagaaaagcattatggctgagaaataacgggtcgacactgatctcacagttactaaatacattattgtatacttttggggcattctggggaatgtatcagttcccaactctggtcagtatcgcactggcgagttatgtgatctttatcattacgagtattgcagatacaccatttgtttatctggcgagaaaaatgcatgaaaaaggcagtatcccggagggacagcagtaaggattttattaaataatatcagaagttcaggggaaatgcgaaagacgaactaacaggaaaaagtcagttagcaatatcatagaagtcagtcatttgcgaaaagatattttccattatctggcaatgtgagtgacaggaaggacaaaaaaatctgggatgtaaagcacctgcagcacactggtgctttattgtatcaagatattcataagtatgcttaaaaaattctttatttgtaggtctgttgtcagaactgcttctgccgaagacttttttgagcatacggtcgttggaagagacccatatagtgagaatactatttcgtatattcttctcgacacatttccatgttgtgccgtagtgattcgcaatatcaatgtataaaaatttcgtaatacaagagatacagtgagggtcttcttccataagaaggaggccgtagacaatataatcgtaaccaaggtttgtctttgaagtaccaagcttttcaagtgtatcaaacaataattctttataattcatgaaccttctcctctcagatgagaacatcgttccttgataatatgttaaaatgagatgaaaaaagacgcaacaaaaatttttcgaagattttcgaactcgtgggaaatgttgtagcctgcaaataaaaagtcaaggctaaattgaaagaacattgaaaattttatacaggttgagtttgcaccagttttgataatggtcaagccataaagttccgtgagtaatggaagaaggcaatgctttgagaaaaagatgagagcaatattctgaaaactacttgagatttttgggaaaatctgccaaaatacttttgtatgtctatggggtaagggaattcatatccttttgccttagaaattatggaaggaggacttgactatggcaaacggaaatgcgacaattattgtcggctcggctcggctcggctcggctcggctcggctcggctcggctcggctcggctcggctcggctcggctcggcaggagcatagtgccgttttttcagcgtgtcaagtcttatttcatacaatttataacgaaccggttgctggagacagggtgcattatgccttggcttcggctttttgcgtttgccggaggaagaaaatagcggatagaattattttggaggaatgaaaatgaagaagaaacttttaagccttctgcttgcgttgtgccttgtgatggcacttgttccgatgacagcgtttgcagaagagaacgagcaaagcagcaaaacctcaatcacaacagtagatgagcttttggaatttgcaaaagctgtggacaatggcgaatatgacgataaaacagatgcggttgtatctcttgatgcagatttggatttaacaggtgttgcgtggacaccaattggcagcgtatttgctgctgatggaactctgctgcattacttcagcggcaaattttacggaaacgggcatacgatttccaatttggatttttccgaaaactacggaaagacagagtatccgtctttcgggtttttcagtgaggtttacggcgctgaaatttccggtttgacaattcaaggcaagctgaatgtgtccaattcagggtatgtctattttggaacggtagcgggcgttgcagcagacagcaaaatttctgactgtgcttcaaatgtgtcgttcacggatacagacaaatatattaacggtactgtggctttgtgcggatatgcgataaatagcacgattgaatactgccaaaacaagggggatttttcaataacgcaggatgtcacctcttttcagatgggcggtatcgtaggtcttgctcaaaacagcaccgtacagtattgtgccaatacgggcgatctgacctcttggacaccctgtactggcggaattgttggacagttgattcagaactcaaaggtcataaattgttattccaccgggaaaatagttcctcttggtaagggaactacggatttcggcggcattgcaggtacagttggcacaggaacagaaataagacattgttatttcgccggggaagtggatctatctcaatatactgccactacaccttataagcgtttaggcggtattgtcggcggtgtttcttctgatacacccgtttttgaaaacaattatttcattgaaacagaaaatgttactgcttgcagtaagtatacggaagcaggtacagcaaagtcccttgaatatatggaaactgaggatttctttaatgagattactactgccggcggcaattatcgatttaattctaatggaacgcccctcttgccagcaccgaaatatgcagtttcttttgttgtaacacctgctgagttggcgaatgtagtcattaaagtgaatggtcaggaagtagcaaacccggttgatttggaaacgggtacttatactgtcgaagtcagtgcagataattgcgaggttttcaatctcaatattacgattacggctgatacagcaactcatacgcagactattacaatgacttatttacctgcagactacactaaggtcgacggagccattgacaaggcaaatgcactgaacaaagacaactacaaggacttctctgctgtagaagctgctgtcaaagctgttgtccgtggtaaaaatattatggaacaatctgaagtagacaagatggcaaaggctatcgaagatgcgattgctgctcttgagaaaaagcctgccagtaccaaaccgggaacatccgataagagtccgcagactggcgatacaagcagccttgccttgtggattgtcctgctgtttaccagcggcggtgcagccattgctacaacggttgtaagcagaaagaaaaagtacaacagataattgaatagcgttccattgttatatcgaaagaaaacgcccagaatcgtcccgaaaccatacagcgggaaacggttttgggcgttctttcttgatgagcgtggcaggaagaagtataacgagctttgcaggaaatgcgaaaggagctgcaagcagagcttctgtgccaccgttattcactgcccacactatctatcgaaaaggagaacgagacaatgacagactatccgaacaacatttccgcaaagctggaaatcatcaaggcaagcgagattaccccgagaatccaatactttccagtggattccatacaaacatgatagcaattattctcgataagccagttgtgaaacctctgaatatctgagttgatggttgaaaaagatttttgcagatattcggatatgccatccttattggtagttacgatggttgcaacgataatattttttgcgtatttcgtgttgcataagattgtaaaatacgcttaaaaagtccaaaataatagaatcatttcagtaaaagaaaaagcggagaacccttattataaaggctttctccgctatccttgaaattacgcacctttttgaaaaaacggagttggtgggattcgaacccacgtgccccggagggcaaacgcatttcgagtgcgccccgttatgaccacttcgatacaactccaaaatgttgtcaaatgctatacaactcaatcattataacagaaagcaggttaaaaagaaaccccttttattccagtatttttccataaaataaaagggtttgtggaataaaagtgatggaaagatcaaataatgtagaaagaaaatctatgcagaggatgcaaaacaaaaataaaaggaggcagacggggtgatcaatatacagaaagcagcagtgatcggatgtggatttgtaggggcatcaatagcctatacgcttatgcagaaagggattttttcagaactggttctgattgatgcagtcatggaaaaagcagagggagaagcaatggatatcagtcatggacttccatttgcccatgcgatggatatttatgcgggaacatatgccgatatcgcagatgcatcaattctcattattacagcaggggcaaatcagaaagagggggagacaagactggatctggtacagaaaaatgcaggtatcatgcgttcaattatcggaaatatcagaaaaactgcttttgacggactacttctgatcgtatcgaatccggtagatattctgacagaggttgcactgagagagtcgggctatcctgaagagcgggtcatcggttcaggaactgttcttgatacagcacgattaaaatacctgatcagcgaagaactggagattgacagcagaaatgtgcatgcttttattgtcggggaacatggcgacagtgagcttgcagtgtggagttgtgccaatatatatgggatcccggtggaaaagtttgcagaactgcggcggcagaagggattttcggaggaaatgaaggaaatatactgtagtgtaagagacagtgcttatgagatcattaaacgaaaaggagcgacttattatggaatcggaatggcagcggctaagattgcagaagcactggtcagggacagtcatacggttgcaccggtatcagttcatttaaacggagaatacggactgcaggatctgtgtctgagtattccgaccgttctgggaaaaaatggtgcagagcagatattagaaatcaattttaatgaagaagaaaaaaggaaattatggcattcggcagaggaactgaaaaaaatattagcccggatctgaaaaaactccctctggtcggactgacacggagagagtctgaaagcagaaaactgcttttggattgtctgaaatttactgctggtacttggaaatatgagccttgattgcctcaaaactttccgcactgatcacatgttccatcctgcaggcatcttctgatgcaatctccgggtctaccccaagctgggtgagccaggaagaaagcagggtatgacgttcatagatacgatctgcaatttcttttccggtttcggtgagtgtaatgaagccctcaggagaaacgataatatgatgtgcttctctcagctttttcatggcaacactgacactggattttttgaagttaagttctgttgcaatatctacggatcgtacaaccggatgagtcttactcaacatcagtatcgtttccagataattttcagaagattcatttacttgcatggacatacacctctattacttataattctttccttgtcctttagttactattcacagcatgaataataaatacagtataacataaataatgaaatatgaacagcaaatcttttttatattgatagattatgttataattgaacaaataatagaaagcgttttttctttatatataccagtgaggaaatggcatagagagaaaagattaaagggagagggttgaatgaaaagagaggagatccagaggctgatccggattgcagaagagcagatgagccatgcctatgctccatattcgcattttcaggtaggtacggcactcctgacagccggtggaaaagtgtatgcaggctgtaatattgaaaatgcggcatatacaccgtcgaattgtgcggaaaggaccgcgttttttaaagctgtaagcgagggcgaaaggaaattttcagcaatctgtattgttggtggaatgaacgggattgcagtggagtatacagctccctgtggtgtgtgccggcaggtgatgatggaattttgtcaaccggagacttttcagattattcttgcggtggacgaggaaaattataaagtctgttctttacgggaactgtttccgtttggcttcgggccggataatttgcaggaacgggatgaataaaaatgcagagatttgtatgagagtacaggtctttgcattttttttacacctgagaaattcgcaaagcatctttttgtagttcatgaaaaaagaggttattgataaaaattgatgtcggggtcaaaagtccccgactttgatgcctacggattgctccgtgctacgcactcccacaatcctacccaatattcgcatatcgtgggattatcatcccacttttatgctcatatcggggcgggtcctaaggtctttcacccacctatgagcaagctcatgtgggcttagaccttttgaccctggcatcaaaaattttttgaaataattctaaaaaaatacaaaaaagagtccttgacaactaataaacgttagcgtatactaactaacgtgtagaaagtaaatgaaaaaaattatcaatctcaactgttgatgattttcaatctcatttattaaagaataatctgcaaaaattatacatagaaagaagcgtgcgaatatgccacttacaatggccaatataggtgaaaccaatacgattaaaagagtcggtggaaatgaagagacaagaagatttcttgcgaatcttggatttgtagtagatgcagaagttacagttttatctgcaatcggcggcaatgtgatcgtgaatatcaaggattccagagtcgcagttaatgctgatatggcgcgtcacattatgatctgattgagaaatgtgctgctgtatatataaggaatattttatgaaaggagacaatggttatgactttaggtgatgtaaaagtaggaagtactgttacagttacaaagattgcgggagacagtgcctacaagcgtcgtattatggacatgggaatcacaaagggaagccagctttatatcagaaaggttgcaccgcttggtgatccggtggaaattacagtccgtggatatgagctgtctgtcagaaaggcagatgcccagtgtgtagaggtgaaataagtcctgaacacgcataaccaatctgttaaactataaggaggtaagaaaggaatggcaattacgattgcacttgccggaaacccgaactgcggaaaaactacaatgtttaacgcattgacaggtgccaaccagtatgttggtaactggccgggagttacggttgagaaaaaagaaggtaaagtaaaaagcaagaaagcaaagggagaagagatcacggtaactgaccttccgggaatttattctctttccccgtatacactggaggaggttgtcagccgtgattatgttttaaatgagaatccggatgtcatcattgatctggtggatgcaacaaatattgagcgtaacctttatctgacaactcagttgatcgagacaggtgttccggttgtgatcgcactgaacatggcagatctggttgcaaagagaggaatcaagattgatgtgaagcgtctttccatgcttctcggatgcccgatcatcgagacttctgcactgaagcagacaggtcttacagatctgattgatgaagcggttaaagttgcaaagcagaaggaagtgaaacttccgggcgagatcttctccaaagatcttgaggcagcagtagacgaagtgaagaatttgcttccgatatctatttctgaggataagaagagatggtatgctgtaaaattccttgagaatgacagcaaggtcgtagagaatgtgaaactttcaggagcagcatctgcaacagttgctgaccacagaaagaaactggaagagaagcatgatgatgatatggaaagtattgtaacagatgagcgttacaaatacatacagaagatcgttggaacaaccgttcagaaagaaaaacagaaactgacaacatctgataagattgaccggatcgtaacaaaccgtatccttggtattccgatcttcatcctggtaatgtgggctgtatattatatctctgtaacaacagttggtacatttgtaacagactggacaaatgatgtatttgtagtagcaatccaggatgccgtaagcagcggacttcaggcaatcggtgcaggtgatcttgtacaggggcttgtagttgatggtatcatcggtggacttggagctgtccttggtttcgtaccacagatggcaatcctgttcctgttcctgtcaatccttgaagattgcggatatatggttcgtatcgcattcgtcatggaccgtgtgttcagacactttggactttcaggaaagagctttatcccgcttctgatttcctcaggatgtggaattccgggaatcatggcttctaagacgatcgagcaggataatgacagacgtcttacaattatgacagcaactttcatcccatgtggtgcaaaacttccggttattgccatgatggggggagtaatcgcaggtgaagtagcgggatatcaggaaagctcctttatcgcaccgctgatgtacttcatcggaatcgcagcagtacttgtagcagcgatcatcctgaagaagacaaaacctttctcaggaaaacctgctccgttcgtaatggagcttccacagtatcatattccgcaggctaagacagtacttctccatgtatgggagagactgaaaggcttcattatcaaagccggaacaatcctgttccttgcatgcgtagtaatgtggttccttggtggatttggatttacagcagatggatttggaatggtagaagacagtgcagacagcttaatggcagtaatcggtggagtgatcgctcctctgttcgcaccacttggattcggcgagtggcagccggttgcagcttctatctcaggatttacagcaaaagaagcaatcgtttctacgatgggagttcttgcaaatgtagcaggagatacagaggacgcagtcaatgttgcacagggtgttgcatcctggttcccttcaacaatcgcagcatttacgttcctgctcttcaaccttcttgactcaccttgtcttgcagcaatcgctacaatggcacagcagatgcagtctaagaaatggttctggtttgcaattctgttccagaacatctttgcttacattgtttgcctgatcgtatatcaggtaggatctttcgtaacaggcggagcatttggtatcggcacagcagtaggatttatcttcctgattgcccttctgtttatgctcttcagaccagatccgtataagaatcagaaagtatattcaaaacgttccgtacagaacgcataaggatagtattcgtaaggaagctggatgcggaaaggtatccggctttctgttataatggaagctaaatgaacgggaaatgacagaaagaagggtgaaagattatgatggccaatattgtgatactgacactgatcgcagcctattgtatttatctgatctataagggctgcaagaatatgaaagaaggaaagcatcccggttgtgccggatgcagcggaaactgtgggagctgtggcggctgcacaggacatacagaaaagtataaaaagaaagactgaaaggtgattttaaaatgggaagttcgacaggttcgatgttctatgctttcggtgctttcctgattctgtatctggtgggagcttccatttaccagattttcctttggatcaggaaatggcgtgaaaagaaagaaaatgacatagaagaaaaatagatagaagattcaaaaagaaaaaggagaatggagaatggtagatgcaattattattgtacttgtgatcatattactcttttttgcattgaaaggctcattgaagcacttcaagggtgagagtccgtgctgcggtggcggttcagggaattcaggaaaagcgaaaacgaagttccttgacggtccggtgatcggcaaaaaaacgcttacaattgaaggaatgcattgtgagcattgtgtaaatgcagtgacaaatgctttaaatgagattgatggcgttgttgcgaaagtaacattaaaaagcaacagtgcagaagtgtcttatgaccgggagatcaatgaggcagatctgaaaaatgcagtaaagaaagccggttatgaagtgacaggtatttcataagagactgactggaggtgcaccgtgaacagaaaagagcagattgtagaaaaactgaaagagaacggatgccgcattacgaaacaaaggcgaatgctgatcgatattattcttgagaatgactgttcaagctgcaaggagattttttataaagcatccagggcggatgaaaagatcggggtagcgacagtatatcggatgattaatgcactggaagagatcggtgcgatcagccggaagaatatgtataaggtagaatgcccggaggaatgccggcaggagggcgggtgcattatcactttggatgatgatacaacgtatcatctgacagatcagaactggaacagggtagttcaggaaggtttgaagcagtgtgggtatttaaaggaccagaagattgctgaaataaagattcaaagccaaattagttgataaaatttatcagtaattactgttagaattgactagccgcaggtgtgggagctatgatttgtgctgaaaatagatttaacaaaggagacgaagcattatgtgggatattttaaaagtaaaaaaagcaggattatttgcaggtggagtacttttcggaacggcaggtgtgaaacttctttccagtaaagatgcaaagaaattttatacaaattgtacagccgctgtattaagagcaaaagattctttgatgaagacagcaacgactgttcaggagaatgccggggatattcttgcagaagcacagcagatcaatgaagagcgtgcagcaaaagaggcagcagaggcagagatcgtagaagagacagaagaaaatacaggtgcggaagatttcaaagaggaagaagtttaatcctgtatgagattttgcataaagcatgagatgaaaggccgtctccgtatacatatcatccagaaccggatgacgtatgcggaggcggatactctttcctggtatcttgaagagcaagaaaatgtgacagaggtaaaagtatatgaacgcaccgcagatgctgtcatctgttacaaaggagaaagggaagagatactgacagttctgaagcagttcagctatgagaaggctgaagttccggagacagttttatcaagttccggcaggcagttgaacgaagagtacaaggaacgtctgattacgaagacagtattgcattatggaagtaaactgtttcttccgatgccggtacgggcagtgatcacttctgtgaaatcagtgaaatacatctggaaagggattcgttgtctggcacatggcaggctggaagttccggtactggatgcaacagcgatcagtgtatcggtgttcagaaaagattttgcaaccgcaggttctgttatgttcctgctgggaatcggtgagatcattgaagagtggacgcataaaaagtcagtaggtgatcttgcgagaagtatgtctctgaatgtcaagaaagtctggctgaaacgggaagatcaggaaattctggtgaagtcttctgaagtacagccgggagatgagatcatagtccatatgggaaacgtgatcccgtttgacggtgaggtttccgatggggaaggcatggtcaaccaggcttctctgacaggagaggcaatgccggtgagaagagtttcggggcagagtgtttatgccggaactgtactggaagaaggagaactgcagatccgggtgaaggcagtgaccggatctacaagatatgaaaaaatcgtcagtatgatcgaggattctgaaaaactgaaatccagtgtagagggaaaagcagaacatttggccgacagacttgtaccgtatacattacttggtacaggggcggcgtggctgcttacaagaaatgtaacccggacattgtctgttctgatggtagacttctcctgtgctttgaagctggcaatgccaattacggtactgtctgcaatccgtgaggcgggagaaaatcatattactgtaaagggtggaaaattccttgaggcagttgcagatgcagatacgatcgtctttgataagaccggaacgctgacgaaggcaactcctacagtgaaagatgttgttgtatttggtgagtatccaaaagaagaagcactcaggattgcagcatgtctggaggagcattttccacattcaatggcaaaagctgtagtcgatgcagcaaaggaacgcaatctttcacatgaagagatgcattctaaagtagaatatatcgtggcacatggaatttcttcctatataaatgataaaaaagttgtaatcggaagcagccattttgtctttgaggatgaggaatgtacgattgatccacagtatcaggatcgttatgatacacttccgccggagtattcccatctttatcttgcaatcgagcataagctggcagccgtgatctgtattgaagatcctctcagagaggaagcagcagagatggttaagagcctgaaagctgcaggtatcacgaaggttgttatgatgacaggagacagtgaacggacagcagcagcaatcgcaaagcgtgtaggtgtggatgaatattatgcagaagttctgccggaagataaagcgaattttgtagaaaaagaaaagtctgagggaagaaaagtgatcatgatcggagatggaatcaacgattctccggcactttccgcagcagatgcaggaattgcgatcagcgatggggctgaaatcgcaagagaaattgcagatattacgatcgctgcagatgatctgagggaagttgttactttgaaattgctttccaatctgatgttaaagaggattcacagaaactacagaagtattgtcggaatcaattccggtctgattgtactgggcgtgacaggaatgattcagccgacgatgtctgctttactgcataatacatctacattgctgatcagtctgagaagcatgaggaatcttcttcctgaaaaggaaaaagtagaattataaaaagattaaaaagattaaaaaatcagaaagatcaaaagatcaaaaaaagcaattcaggcagggtatgcattttagcgtaccctgcttttaaagtgtgagggtttgttgctatttcagatactgtttttatggcaagttaagattgctattgagaaaaaatatcaactaagtgtattgataaccattctcatgtatagtatgatatatgatatgagttagaaaagactaactaaagtaagctgaagcgatgcgttgagatacaatagagtcagacaggaggatcgaaaaatgagcgttgttattataggtggtcatgacagaatggtatgtcagtataaaaaagtatgtaagcagtttaattgtaaagcgaaagtatttactcagatgtcggcaaatttaagtaagcagatcggaagcccggatctgatcgtgctttttaccaatacagtgtcacataagatggtacggtgtgcggtagaagaggcgggaagatgtaatgcagatgtgatccggtgccatacaagcagtaaaaatgcactggaagagattcttggaagtgtgtgtgcataatcaatcagttctcgtgtaaattaaatttgtatttgttggaatgaaaatgtttcggcagtcagagagattttaatagaagagcttccatatccgcccttgctgttgcatcgcagtgcaggacccgctttacctcagcccgttgacaacttgtaacaggaatgtggaaacactcgtgcagaggcactcctgtttacgttccttaacaagttgggcaaagtgtcttcggaacgctccctgtcaatgcactgctcacgcaacaacaagtgtggatattaggcttttcaagtcagataactttcctcgcaccggaacattttctcccaacaaacacgaaattccaataagaaataaagagccggatggctatcgactaagataaatgctccatcaaatagtaaagatgtcggggtcaaaagtccccgactttgatgcctacggattgctccgtgctacgcactcccacaatcctacccaatattcgcatatcgtgggattatcatcccacttttatgctcatatcggggcgggtcctaaggtctttcacccacctatgagcaagctcatgtgggcttagaccttttgaccctggcatctagtaaatacaatatctactatctaatatttacgatcgaatatcttagtcaatagccatccggctttttctattctttttaaatttgcattgttgagtgaatacgctgtggagtcagaaaaaaacttcttactgtgactaccagcggaaagcaggatgttcctgagcaggtgcattagcaggagcgttccgaagacactttgcagcgtttgttagagaaagtaaatcgagtgctattgcacgaagatttccactttcgagttacaaacggtcaacgggctgaggtaaagcgggcctgcaccgcgaaggaatatctctgatttccgcgtccgcttcttcacaaagaagctttctaatctacaagcgtatcaccccaacaattacaaatttaaattcttgaaaagatctccaaggcttgtgccgatatcttcactctttggaatctcaaccttttcaaccggctcttcttctttctcttccagtgctttcatactgagactgatcttaccgtctttgataccgataacctttacctctacttcctgtcccacttcaagtacatcggaaggaagtttcacacgcttctgggagatctgagatacatggacaagaccggacagaccattctcaagctttacaaaagcaccgtaattctgaagggtctcaacggttcctttcagtacagaaccaacctgaatacttgcgatcagagcttcacgggcttttttctctttctctttcagcagttcacgtgcagaaaggacaagacggttatttgcctgatccacatcaatcacctgaacttcaatatccttgagaaggtaagtctcaagatcttcaatataggaaagggaaagtctggaagcaggaacaaatcctcttaatccttctaccatgacgataacaccaccgttgacaactccctcgacttttacaggaagaacggtctttttctccaggtactcttttacacggttccagggatttgcatcatcgaaatgatcttcataatcagccatggtctctgttgcttcacttgtctgtaattcttcttttaattgttcgctcatagcagtcacctttgttcctctctttttgttaaaaactaaaatcagtatagcatatgtatctgaaaaaaaacagtaaatcgtggaaaaactgcctctaaaatgttaaaatcaggttggcttataatgaaaaaaatgttaatcttttagaatcaacagagaaatggagtaatacagatgagtaatgataaaagaaaagtgtacgttgtcggacataagaatccagatacggattccatctgtaccgcgatcgcttatgcaaatttaaagacgaaactgacgcagatcaggcatgaaccgcgtcgtgccggtcaattaaatgaagaaactcagtatgtactggaacgttttggagtgaaagtgccgttacttttatcggacttaagagagcagatcaaagatgtggatctaagggaaagcgaagagattaatggaaatctgtccattcgtactgcatgggaaaagatgaccgagatgaatacgcatacacttcctatcacaagagacgggatgctggaaggtgtgatcacgaaaggtgatatcgccaaatcctatatggatgtttacgataatacgatgctggcaaaggcgagaacccagtatcggaatattgcagccgctgtagaaggaaaagtggagacaggaaatgagcatggctattttcagaaaggaaaggtcgcaatcgcagcatccggtaaaaatcttatgacccgatttattgaaagggatgacctggtgatcatgggagaccgggttgatgcacaacagtgtgccattgatatggatgcaagttgtatggtcatatgtcagggctatccgatctcggaagacatcctgcgtcaggcagagaaaaaacagatcgttgtgatccgtacaccgcatgatacatttactgctgcacagcatatcaaccagagtatcccggtccgttttttcatgaccagagaaaatctggttacatttcatatacgggattttgtggatgacgtaaaagaagttatggcaagaaaaagattccgtgatttcccggttctgggcaaccagggaaagtttgtaggacttgtatcccggagacgcctgttgaatgtgaagaaaaagcaggtgatcctagttgaccataatgaaaaaaatcaggcagtcgacggagtggaagaagcagatgtcctggagattatcgatcatcatcgcctgagcagtattgagacgatgggaccggtttatttccgtaatcagccggtgggatgtacggctacgatcgtatatcagatgtatgaagaaaatggaattgcggtggatgcagtcaatgcggcactcctctgttcagcaatcatttctgataccctgatgttccgttctccgacctgtacaccactggatgaggtaacagcgagaaaactggcagaaatcgcttcgatcaatattgaagaactggcacaggagatgttcaatgcaggaagcaatttgaaaggaaagagtgcagaagagattttattcctggatttcaagcagtttacggtgaatgatacgatgtttggagtcggacaggtcaattccatgagtgcagaggaactgaaagaaatcaaagaaagagttctgcctcatatggagaaggcacgtaaaaatcatgggctgaatatgatcttctttatgctgacgaatattatcacagaatcttcagaactgatctgctgtggagcagaggcgagagaaaaaatcatcagtgcttatgatctgcaggatgatgctgagatactgatgctcaaaggagttgtatcccgtaagaagcagctcgtgccgacactggttggtgcgttgcagcagtaaggagcaggaggaaaaaatggcaaagcagatatggaaaccgggaaatatggtttatccattaccggcggtaatggtcagtacaggagataaaaaaggaaatcagaatattctgacggtagcgtggacaggaactgtttgtacgaatcctgcaatggtatacatatcagtgcgtccggaacgttattcttatcatatgatcgaagaaagcggtgaatttgtgatcaatctgaccacggagaaactggcaagggcaacggatttctgcggtgtccgttcggggcgggatgtagataaatggaaagagtgtcatctgagtgcaaagaaagcacagacgctggaatatgctccctgtattgaagaggcaccggtcaatattgagtgcaaagtaaagaagatcgagaagcttggaagtcaccatatgttcctggcggaagtgacggcagttcaggcagacgaagcgtatctgaatgaaaagggaaagtttgaattgaataagacgggacttctggcttattctcatggagagtatttagggcttggaaagaagatcggtacctttggatacagtgtgaaaaagaaggcggaccggagacgaaagagagggaaaaagtaaatgatttcatttgaaaatgattattctgaaggggcaagtgaaaaaatccttcaaaggctgatagagaccaatatggaacagctttcaggatatggaaatgaccggtattgtgaatcggcaaaagaaaaaatccgtaaggcctgtgggtgtcctgaggcagaaatctacttcctgtcaggaggaacgcagacgaaccggattgtgatcagttccatgcttcagccttatgagggcgtgatcgcagcacagacaggccatgtaagcagtcatgaagcaggtgcaatcgaatcttccggtcataaagtactgacactgccacagcatgacggaaagatcgagccggaagagctggcagattatctgaatgacttttatggggatggaaatcatgaacatatggtgttcccgggaatggtttatatttcacatcccactgagtatggaacgctttatacaaaaggggagctggcggagctggcagatatctgcctggaataccatattccactttatctggatggtgcaagactgggatatgccctggcggcagatacggatgtgacgttaaaggatgtggcggattattgcgatgtattttacattggcggaacaaaagtcggtgcattgtgtggagaggcggttgttttcacaaaagagaatgttccggcacatttcctgacccggatcaagcaacagggaggtctgctggcaaagggcagactgcttggaatccagtttgatacactatttacagaaaatctttatctggagctggggcggcatgcgatgaaatgtgcggaaaagctgaaggcgatatttaaagaaaaaaaatatccgttttatattgattcgccaaccaatcagatttttgtagttctggaaaatgaaaaaatgaaagaacttgagaaaaaggtaaagttcagtttctgggagaaagcagatgatacgcatacagttgtgcgttttgcagtgagctgggcgacacaggaagaaatgatcgatgaattacaggagctgctgtaaaaggggctgatattcttgatttcagaagaatgaaaaaggtggaattcgggaaaaatagaatagaaaaagaaatacatgagaatcattctcaataaaattcttgaattaaggagcagaatctgctaagatacatatggttagttaatactaactatgtgtgaatgaatcatggaagctccttttgccctgaaatacctgaatccagggcttgaggattcctaaagaaaggaagaacaggcaatggattatttagaaattgaaaaagtgattggaagagagattattgattcaagaggaaacccgacagtagaggcagaggtacatcttgcagatggaactgttggatttggtgcagcaccgagtggagcatcaacgggagaatttgaggctcttgaattgagagacggagataaagcccgttttggaggcaaaggtgtttctaaggcagtggagaacattaatacaattatcaatgatgcacttcagggaatggatgcaagtgatgtctatgcagttgacaaggccatgatccaggcagatggaacaaaggataaatcaaagctgggagcaaatgcaatccttgctgtatcgattgcaagtgcgagagcagcagccacatccctggatattccgctgtaccgtttccttggcggagtcaatggtaacagacttccggttccgatgatgaacattgtaaatggtggatgccatgcattatcttcaggactggatgttcaggagtttatgatcatgccggttggagctccttcatttaaagaatgcctgagatggtgtgcagaagtgttccatgcacttgcaggtatcctgaaagagcgtggacttgcaacgtcagtaggagatgaaggtggatttgcaccggcactgaagtctgatgaagaagcgatcgagacgattctcgaggcagtgaaaaaggcaggatacgagcctggaaaagattttaaaattgccatggatgcagcatcttctgaatggaagacaggcaaggttggcgaatataaacttccaaaagcaggaactgtgtatacatctgaacagttgatcgaacactggaagagtcttgtagagaaatatccgatcatttccatcgaggatgcactggatgaggaagactgggaaggctggaagaaactgacagcagagctgggagacaaagtacagcttgtcggtgatgacttattcgttacaaatacagagcgtcttgcaaaaggaattgagcttggatgtggtaattctatcctgatcaaattaaatcagatcggttctgtatctgagacactggaggcaattaagatggcacataaggcaggatatacagcaatcgcatcccaccgttccggtgagacagaagatacaacgatcgcagatcttgcagttgcactgaacacctgccagatcaagaccggtgcaccgagccgttccgagcgtgtagcgaaatataatcagcttttaagaattgaggaagaactcggagcaagtgcagtatatccgggaatcaaggcatttaatgtacagcagtaagtaaaaggaatactgccggataataaaaagatgtcggggtcaaaagcccccacttattatcatgctttcattgataatgagtgggggctttgtgatgattttttggtgttgagggaaattgcgttatgcttttttatgtccttcgtccgcaagggcccgaatagaagagacatattctgatggcgtcatcccggtagaacgcttaaactgccgggaaaaatagtggatggaagagtatccaaggtattcagaaatctgagtaaaattcatctgtccgctgcggatcatggattttgcttcactgatttttaaggcagaataatattcaatcactccggtcccttccgaatcccggaataatttctgcagacgggagcggctgatcaggttatcatggcagatctgctcaatcgttaaatgatctgccagatggctgagcagatagttctttatatgagagaataattctgcatctgtatttttggagagtgtccggtcagacagtggggtccgggaaacttctccggtcagaagagaattctgattacgccggtaaaggctgaggagaagttcttctaaatgaaggcggataagctgaccacagacaggggatgtatcttttctgatctgcagggatgtctgatagggatcgtccagccgtccttccaaaaaacttcctgcttctgcaatgattccggcaagcagccgacgttcagtttcttcgaggtgaaggatctttcctctgaaaaattccatcgcaggatctgtgcaggaaaaagagatcacgatcagattcggtgcgatctttccgtttgccttgacccagtgaaattcacccgggtagtgaaaagcgatttctccgcgtctgagagtatgggtaagaggacctgcaccaatctccacttctcctttatcaacgcatacaaactcccagaaatcatgggattctccgggaaaagaaaaggtactcatatattcaaaataatgaagggaaaacagctcttctatatgaaaaagatcctgaagctgaattccataatatttctttggatttgaaaaatgatctgtatttgcagctacaatatgcattctgagcctcctcctttttcaaaaatgttcttagtaaggatatcatagcattattttccgaaaatgcaaagagaaaatgcagattgtgcaaatgaaagataagatagtataaagatttttatggggttttatcatacaatagaagaagtgtaacatagaaagtgaaatggaggaatcaatcatgaaaaaaccggttcttgtaattatggcggctggaatgggaagcagatatggcggactgaagcagatcgatccagtcgataaagaaggacatatcattatggacttttcaatcttcgatgcaaagcgtgcgggatttgaaaaagttgtatttatcattaaaaaagaggatgaggctgattttaaggaagcagtcggcaacagaatggaaaagatcatggatgttgcatatgcatatcaggatcttcataacctgccggaaggatttgaagttccggagggtcgtgtgaagccatggggaacggctcatgcagttctgagtgcgattgatgaagtggatggaccatttgctgttatcaatgcagatgattattatggacgtcatgcatttgaagtaatctataattatctgacaacgcatgaagatgatgacaaataccgttataccatggtgggataccgtctgaaaaatacggtgacagataacggacatgttgcaagagggatctgtgacctgaatgatgcaaaagaattagttgcagttcatgagcgtacaagaattgagaagcgtaatggtggaattgcatattcagaggatgacggagctacatggacagaggtagatccggagacactggtttctatgaatatgtggggatttacaagaagtattctggatgagatcaaggcagaatttcctgcatttcttgaaaaaggactgaaagagaatccgatgaagtgtgagtatttcctgccatctgttgtgagcaacttattagagtctgagagagcaaccgtgcaggtacttgagtcagaagataaatggtatggagttacatataaagaggacaagccggttgttgtagaggcaatccaggcattgaaagatgcaggagagtatccgcagaaattatgggaggaagactaaagatgggaagagtgtctgaagcacagatcaatgaagcgattgcaaattttgattatgagggaaagcttttaagtaaagagccttttggaagcggtcatattaatgatacatatcttttaaagtatgagatttcagagatgggaatcctgaaagtgatccttcagcgtatgaaccgtgagatttttacgaatccggtagaactgatggagaatgtagtaggggttacgacgttccttcgtaagaagatcattgagaacggcggagatccggagcgtgaaactctgaatgtaatcccggcaaaggatggaaagccttactatgtggattctaagggtgagtactggcgttcttatgtatacattacggatgcaagcagttatgaccaggtagagaaaccggaagacttttacgaaagtgcagtcgcatttggacatttccagcggatgctggctgattatcctgcagagacactcaatgagacgatcaagggattccatgatacaagagcaagattccaggtatttaaagataccgttgcaaaggatgtatgcggacgtgcagcagaagtacaggatgagatcaactttgtactggcacatgaagacgtggcaaatgtatttggggagcttcaggacaaaggaaaacttccgcttcgtgtcacgcacaatgatacaaagctgaacaatattatgatcgacgacaagaccggaaagggaatctgcgttattgatcttgatacagttatgccgggacttgcaatgaacgattttggtgattccatccgttttggggcaagtacagcagcagaggatgagacagacttaagcaaagtatcctgcagtatggatctttttgaaatctatgtaaagggcttccttgagggatgtgacggaaagctgacaaagaaagaagttgaacttcttccgatgggagcaaaagtcatgacttttgagtgcggtatgcgtttcctgacagattatctggatggagatcattacttcaagatccacagagaaaagcacaatcttgacagatgccgtacccagttcaaactggtggcagatatggaaaagaaatgggatatcatgcaggagatcgtagcaaaatataatcgctgatcgtgcaacatttttaccataagatgaaccaaaaatacaaggtatattcagagaatttatggtataatgtacctgtaagttgaaggaaagataacttgatcatattggttgaaggaggagttaaaatgtcaattttagtaaccggaggagccggatttattggaagccatacctgtgtggaacttctgaatgcaggatatgatgttgttgttgcagataacttatacaacgcatctgaaaagtcactggaaagagtaaaaaagattacaggaaaagacctgaaattctacaaagcagacattcgtgataaagaagctatgaatgagatctttgagaaagaagaaattgagtcagtgattcattttgcaggactgaaagcagttggtgagtctgtagcaaagccgcttgagtattatgagaacaatattggcggaacgattacgctttgtgatgttatgagaaaccatggtgtgaagaatattatcttcagttcttctgcaacagtatatggtgatccggcatttattccgatcactgagaaatgcccgaaaggaacctgcacaaatccatacggatggacaaagtggatgctggagcagatcctgacagatcttcatacagcagatcctgagtggaatgtagtacttcttcgttacttcaacccgatcggagcacataagagcggtctcatcggtgaagatccgaagggaatcccgaacaacctgattccatatatcactcaggtagctatcggtaaattagagcgtcttggagtattcggagatgactatgatacgcatgacggtacaggtgtccgtgattatatccatgtagttgaccttgcgatcggacatgtgcgtgcagtagagaaactgaaagagaaagcaggagtatccgtatacaaccttggaacaggaaatggatattctgttcttgatatggtaaaagcattcagcaaggcatgcggaaaagagattccgtatgagatcaagcctcgtcgtgccggagatatcgcaacatgctattgtgacgcatccaaggcaaaagaagagctgcactgggtagctgaaagaggactggatgagatgtgcgaagattcatggagatggcagagccagaatccaaatggatacgagggataatttccaggattactttcctgaaaatgatcgccagagcgtgatcaaaagatagagaaaaggttgttgaccggagatgatggatcagatgaatgagacggattctacagtgacagccttttcttttttgctgcaggggatgtggcagcagtaaaaagaaaaggtggtgacggaatgaagagaaatgtagatttgaatgaaatatctgatggacggctgtattctgccaatgatatggtcaaagtagaatgtggagattgtgcagggtgttctgcatgctgtcagaatatgggaacttcggttgttttagatccgatggatatatggaaaatgcaacgaggaacaggcaggatgttggagaaacttctgaaaaaagaactggagctgaatgttgtggatggaattattttgcccaatctgcgtatgaacggaacgagagaggtctgttcctttctgaatgaagaaggacgctgctcgatccatccatacaggccgggaatctgcaggctttttccattgggcagatattatgagaaaaatggatttcattattttcttcaaattgatgaatgtcgaaaaaaatcacgtggaaagatgaaagtaaagaaatggctggggattgaaaacctgaaaacttatgaaacttatattagcaggtggcacgagttccttaataagagtgaagatggaatgaaagaactggatgaacagaatcagaaggttctgacgttgctgattcttcagcggttttatcagacgccttttcaggcgaaagaagatgaagaattttacagagaattttttgaaagattaagctcggtgaatgaaatccttggattctgattccttttttggggagaaattcttgggttttaaagaaggatttcttaataattatttatgattatccgaggcctcttgtcaacggaaaaagagaatgttatcgtaagggcaggaatataaaatacagaagagatgagagtatcatggtaagggacaacagagaagcagaaacggaaatggaacgaagacggagaaggagaaaggcagagaaactgcgtggacttaagagaagacgcagaagactggtcttagctattctggcagtgctatttcttccgattatcggtgcaagaatttattttggagtgaatccggttatattgaaaaacagcgttattgatgtggaattgaaagattcagtgaatctgaagaaaaatatccgttacgtctttgcgggaaaagcttctcaggtgaagatcactggttcggtagataatacgaaagagggagattatcgggtgacttattcctggaggggaagaaaaaagacggttacagtaaaagtaagagatacgaagccgccagtattggagatgaaaaattcctatacggtagatcttggcggagcagtgactgcagatgattttgtgaaaaaggtgaaagatgcatcggaagtgtcattaaagattctgaatgctaaaaaatgggataaagcgggagaatattccatttctgtggaggcaaaagacatctatggtaataagacgacaggaaagtcaaagttgatcctggaagaagataagacaccacctgaaatttcaggggcggaagatacggaaattttgcagggaaagaccatggatttttccagtggagtaactgtaaaagataatgcagatccagatccgtctttaagcgtggattcgacaaaggcagacctgaatacaccaggaacatatgtggtaacttatgtcgcaaaagaccgttcggggaatgagacaaaggtggagagaaagattaccgtaaaggcaaatcctgagtggaaagagaagatcgtatatctgacctttgatgacggcccatcagagaatacagggaaaattcttgatattttaaagcagtataatataaaaggaacattttttgtaacgggaaaccatcgggagcatgatgacctgatcaagagagcatttgatgaaggaaattccatcggactgcatacatatacgcatgattatgctacggtctatgcttcggagcaggcatatttcgatgatcttcaaaaagtttcagaccttgtagaaaagattacaggagagaaatctacactcatccgtttcccgggtggatcaagtaatacagtcagtgcagactatgtgcagggattaatgacaacgctgaccaaagcggttcatgaaaaaggttatgaatactttgactggaactgtgattctacagatgcaagtggaaataatgtcgcagtcagcaaactggttcaaaatgctacattatgttcagcagatcatgtgacaattctgatgcatgatacggatgcaaaagatacaactgttgaagcattgcctcagattatagaatattatagaggacaaggatatagctttaaaggactgacaaaagattccgtggcggcacatcatagggtaaataattagtgaaatttgtagttgttggggtgaaaatgattcggtagcaggaagtttttttgacagaagagcatccatatccacacttgttgttgcatcgcagtgcaggacccgctttacctcagcccgttgacaacttgtaacaggaacgtggaaacactcgtgcagaggcactcctgtttacgttccttaacaagttgggcaaagtgtcttcggaacgctccctgtcaatgcactgctcacgcaacagcaaatgcggatattaggcttttcagatcagaaaattttccctcatgccagaacattttctcccaacaaagacgaaattccaataagaaataaagagccggatggctattgaccaggataagcaatctgcaaactgcaggatttgatatcttagtcgataaccttccggctcttcttcttatttttaaatttgcattgttgggtggatacgctgtggagctaaaaaacttcttatcgagatggtcagcggaaagcaggatgttcctgagcaggtgcattagcagggagcgttccgaagacactttgcagcgtttgttagagaaagtaaatcgagtgccattgcacgagcatttccactttcgagttacaaacggtcaacgggctgaggtaaagcgggcctgcaccgcgaaggaatatcctgctttccgcgtccgcttcgccacaaagaagctttctgatttacaagcgtatcaccccaacaaatacaaatttacagtacactgataaatcttctaaatgcctcaagtccttccggtgtgcatttgtatacgcctgcatcttccagtacctggcagaagacttttcctacttcctgctgaagaatttcttctacattgctttcattgacatccgggtaggatggaagaaattcgtcaacccagtcagcatgctttgcaatctgctcattgctgcggatatctttcttttcaaggatatattctttcaataattccatttcgcctttcagacgtgccggaagaactgcaagtcccattacttcgatcagaccgatattttcctttttgatatgatgaagctttgcgtgtggatgatatacacccagcggatgctcttcagtagtgatattatttctcagtgtgagatccagttcatacaggtcaccacgttttcttgcgatcggagtgatcgtgctgtgtggtgttccgtcagtttctgcaaagatgaaagcttcttcatctgtataaccacgccatttattcaggatatgttcagcgaggtcgatgatacgctctgtatcttttccctgaagacggatcacagaaagtggccattttacaatgccggctgtaacatcttcgtatcctgctactgtaaagttctcgatcaccggtgcctttgccatagcaaaagtatagttacctccctggaagtggtcgtggcttaagattgatccgcctacgatcgggagatcagcattagatcccaggaaataatgtgggaataatttgatgaagtcgaacagctttgcaaatgcatggcggtcgatcttcattggaacgtgctgtccgttgaatacgatacaatgctcgttataatatacatatggagaatactggaatccccattttccgttctggatcgtgatcgggatgatacggtggttttcacgtgccgggtgatccaggcgtcctgcatatccttcattttccatacagagctggcattttggataagcagaagactttgcttttcctgcagcagcgatggcttttggatctttttcaggcttggaaaggttgatcgtgatatccagagtaccatattctgtatcaacagtccatttgcggtcctttttgatacggtatctgcggatataatcactgtcctgactcagcttgtagtagaaagcagttgctttttcaggagactcttcgtattttttccagaaagcgtcctgaacctgagccggacgtggcatgagacagttcatgatctttgtatcaaagagatcacggtatccgatactgtcttcaatgatgcctcttgcaacagcctcatttaaaagatcagcaagtacgtcttcaagaacgatgttgtcaaggtcgcagtctgtatcttcgtagttattttctttaaaaagatccaaaagaaggttcgttgtatagattctttcagattccggtgtcagcccggtattaattccgtactgtactaattttttgattgattcataaagcatgataataaatcctcctttaaggtaaaaatataatgtggttaagcaagtctggaagctccgtctccgatatcaacagtatagaattctgcttcatgtccgactttttctgcataggcttttccaatcgtttcaatgaatgtatcaacggcctcatctttcacgatgctgacagtacatccaccaaatccgcctcctgtgatacgggaaccgagaacaccggggatcgcccaggcaagatcaacaagaatatcgatctcatcgcaggaaacagcataatcatcccgcagggaaatgtgggactggttcatcagtttaccaaattcctcgatctttccgtccttaagtgcctgtacagcggtgatcgtacgctgattttcgtaaacggcatgctttgcacgtttccgctggatctcatcagagataagctctttgttggcttcaaattcttcgatagagagatcacctaaagactggatatccagctttgtctgaagagcctttaatgccgcagcacactcatttcttctgtcgttataagcggaatctacaaggctgtgcttcaccttgctgttggtaatgacgatctttgcaccgtccagcacgcaaggtgcatactcatagtccagagtagctgtatccaggaagatcgcatgatctttctttcccatggcaacagcaaactgatccatgattccacagttgcaaccgttgaagttattttcagaatactgtccgatcagggcgagatccgtcatggacaggtctttgatatcaaaaaggtcagataaaataactccggtcagaacttcaagtgaagcggaagaggaaagaccggaaccattcgggatatttccccagatcaccatatcaaatccactggaaatcggatgtcctttttccgcaaatgcccagacaactccgagtggataatttgcccagttgtattcttttttgttcgtgagatcatccagtgaagcttctacgacaccgaatgaatcaaggttcatagagtaaaaatgaatcttgcggtcctctcttttacgggcagctccgtaagtaccgagcgtcaatgcacacggaaatacatgacctccgttataatcggtatgttctccgatgagattgacacggcccggggaaaaataaaaatttactccgtcggaattgccgaagagttccgcgaatttgtcaaataacttctgcttcattttacaatcctcctgtaatcaatattgcccgaaacattttccatgtctggatactgattttattataaatgaaagagtcggaaacgtccataaaaaatacgtgctgtcatatgtaaaaatgttgcagtgaaaagaagaaacgtctataatgataaaagatggagcaaagacgggaggctggtttatgtcagattcttataagcattcttatattgtcggagaaaatctgttaaattccctgtcggtatacaatgtagggtatcagaagtgcgatccggagtatcagtggggaccgggagtgagagatcattattgcatccaccatattttctcgggaagtggttcttatatgatcggagaaaagcagatccggttaaaagagggagatacgtttatcctgtatccgggagtggaagtgcggtactgtgcggaccgggagaagccgtgggaatatggctgggccggttttatgggaactgatgcggcatcgatcataagaaatacggatttcacaaagaaaattccatatattcctgcgggaaagattccggacaggaagatcagggaaggtctgcagaagatttatgatgtcaagggaaatacctatgaagctgcggttgcaatgacgggggcgttgtacagtttccttgcggtttttatgcattatcatgaaagtgaagttccggagcgggatgccaggatgatgtatgtggaaaaagcagaaaattatatagaaacgaattattcttatcctgtgacggtggaagatgttgcggactatgtaggaatcagcagaagtcatctgttccgctcttttcagacttatatgaactgttcgccaaaggaatttttgtcccagtacaggatcaagcaggcatgcaggcttttaaaggagactgatctgtcggtttctgcgattgcatattctgttggatttgagaataatctttatttttcaaaggcattccgtaagcagaagcagatcagtccgaccctttacagagaaaagcacagaaattataccggttcaggaacggggatggaacggcgggcagattgattctgggacaggaggatggagcaggagcgtgctgttgtatagattttggaatcagaagaaaccggggagcatataataaggtgactttctggaattgggggctgtcagtgtgaaaagaaaaagcagtgatctgacagaattttatatacagtttctgatcgtggtgtatctgctgtggagttttcctgtgctgtcttttgggcagaaggaagtgcttgttcctgcagacggaacggtatcggagggagaagagcagccggtggtggcactgacttttgatgacgggccgtcgggaacttcaacacctgtgttactggagggactgcggaaaagaggcgtgcgtgccaccttttttgtggttggagagaatgtcgaaaagggggaaaatgcacagatcctacgtgaaatgagtgcggatggacatctgatcgggaatcatacatatcatcatgtaaatctgtcgaaaatgtcagcagaacaggcacaggcagaactggatgcaacggatgaactggtcagaaagattaccgggaagtacccgatctatgccagggcaccttacggagaagtgccggaaaatggcgatgttgaccgacaaaggttttatataggctggacggttgatccgctggactggatgaccgaagatgtgtccagaattacgcaaagtgtattggaaaaagtagagccgggagatattattttactgcatgattcgtatcttagttcggtgcaggccgctttaaggatcgtagatgccctgcagggaaaaggatatgaatttattacagtggatcagatgatctcagattaaggcagaaaagactgagttaccggaggctcatgtgcagaacagagagcctggaagaaaaataaatggagagaataaaaatggatctatttgattatatgcgggaaactgcaaaggaaaaagaatcaccactggcttcgaggatgcgtccgacgacgctggaagaagtagtgggacagcagcatatcattggaaaagggaaacttctatatcgggcgatcaaggcggataagctgagttccctgatcttttacggccctccgggaaccggaaagaccacccttgcaaaagtgatcgccaatacgacaagtgctgaatttaagcagatcaatgcgacagtagccggaaaaaaggatatggaagaggtcgtgaaagcggcgaaggatctgcagggaatgtatggtaaaaagacgattctttttattgatgagatccaccggtttaataaggggcagcaggattatcttctgccgtttgtagaggatgggactttgatcctgatcggggcaacgacggaaaatccgtattttgaagtgaatggtgctttgatctcacgctccagcatttttgaattaaagccgttagagaaggaagacattaagaaacttctggtgcgtgcggtagaagatacagaaaaaggaatgggaagttttcatgcacagatcgacccggatgcactggaatttctggcagatgtatccggtggagatgcaagaaatgctttgaatgcggtggaacttggcatacttacgacagaccgcagcagtgacggaatcatccatcttacactggaagttgcatcagaatgtattcagaaacgggttgtgaactatgataaaaaaggggataaccattatgatatcatttctgcctttattaaaagtatgcgggggtcagacccggatgcagcagtcttttatcttgcaaaaatgctgtatgcgggagaagatgtgaagtttattgcgagaaggatcatgatctgtgcctcagaagatgtaggaaatgcagatccgatggcactgaccgtggcagtggcagcagcacaggcagttgagaggatcggtatgcctgaatcccagatcattttatcccaggcggtgacttatgtggcatctgcaccgaagagcaatgcggcagtgaatgcgatttttgctgcgactgaagcagtgaaaaaatataaaacgactgtaccgtcacatctgcaggatgctcactataagggagcagaaaagctggggcatggaacaggctacaaatatgcacatgattatccgggacattatgtggaacagcagtatcttccggacgaaataaaagacgccaggttctacgaacccggcgaccttggttatgaaaaaaagatcaaagagcatctacagaagctgcgaaagcagtgatgcgtagatctcctgatttttcagattccagttatttacaatggctttggcttctttttctgtgggaacggtgattcgcatgtcaatgaggctggagccattttctacgatctgacactgcacttcaaactgatggtctgtcttgagataatagtcggatttgacagccacttcttctttcagatcgtactgtttttctttcagaaaatcatcaatttcggtacggatttcgggtgaaatcttattgctgaaaaagtggatcgtgtctgcaccggtctctgtcagacggtagagtgtacggttgtgcgttgtctcgatcttcagaagttcggaatccgtcagttctgataaggtttcctgaagccggaaataagtcgtatatcccttgtccagtataaattcggaaatctgtgaagtagtcagtggaaaatccactttgtccagcatatagagaacaatcagtttatataacgtgtaagtttcagccataatactcctttccctgccagatatcctgttttttcaggtattggtggatgtggtttaatacagtacgctttgctccggtccattgtggttcgatgagcagatcctttggaccgtccccggtaagccggtggatgacgatgtcagggcgtaaatgtgcgatacagtttccgatgcagcggatatattcgtccatgtcaggaatatgaaaaggcgagcgtgcataatcgcgtgcaagatcggttccctttaaaatgtggagtagctgcaatttgatcccatcaatgggattgcagttcagataatcgatggttttaagcatctgtgcttctgtctctcccggaagaaaaaggatgacatgcgtgatcacctggattccggccgctttcagtctgactacagcatcgtcaaaaacctccagcgggtatccccggcggatgtagcgggcagtctgcggatggatggtctgaagaccaagctcgatccagaccggcttgatctgatttaagcgtctcagaagttctacggtctcatgagacagacagtcaggacgcgttgcaacggcgagtacccggacatcgggatcaaggattgcctcggtaaaaatcttttccaggtattcgacaggtgcatacgtatttgtaaatgcctggaaataggcaatataggaatgaaccggtcgtttcgcctgaagagccgcttttccggcagcaagctgttcgcagatactgaaagaggcagatccggcaaagtcgccagatcccatgccactacagaagatacagccgccccggccaatctttccatcccggttggggcaggtcatccccccgtttaatgcaatccggtagactttttcaccaaactgactttttaatgcataatccagggaatgatatcttttttcaccccagcgtacaggcatcggtacagaacgggttgtggtaaagccatctgccatatcagatcagatcctttattgctttacttacagtttcagctacacgcgggtcaaatgcctccggcaggatgttgttctcgttaagttcttcttcaggaacaagacctgcaatcgcattggcggcagccagcttcatctcttcggtgatctgagtggcacgtccctctaaagctcctttgaagattccagggaaagcaacaacgttattgacctggttcgggaagtcggagcgtcctgtaccgacaacttttgcaccggcagcttttgcgagatccggcatgatctcaggtaccgggttcgccatagcaaacaggattgcatcctggttcatggatgcaaccatctccggggtaacaatattcggggcagatacacctacaaagatgtcagcacctttcagagcatcggcaagaagaccgatccgtccctcaagatttgtcacttttgtcatttctttctgcatccagttcagatccggtgaatccttggaaatgattccgttgatatcacacatcgtaatatgcgggaatccataagtcagcagcagtttagtgattgcaacacctgcagaacctgcaccgtttacaacaacacggcagtcttctttctttttcccggttacttttaaggcgttgatgatgccggcgagaacaacaattgcagttccgtgctggtcatcatggaagaccgggatattcagaagttcctttaaacgggtctcaatctcaaagcagcgtggtgcggagatgtcctccagattgataccaccaaaagcaggtgcaatattgacaacagagcgaatgatttcctctgtatcctgcgtatccaggcagatcggaactgcgttgactccgccaaattctttaaagagaacacattttccctccatgaccggcatggcagccaatgcaccgatatttccaagaccgagtacggcacttccgtcagagacaacagcgactgtattggctttcattgtataagtataggcggcttccgggtctttggcgatgactttacatggttcagcaacacccggagtataggcgatcgccaggtcttcccgggaattgacgtgagcctttgccgtggtttccagttttccattccattctttgtgcatctgtaatgctttttcgttatttgtcatattttttacctcgcagaatcaatttgtaattaataataacactcccgcagatttcatgcaatatccgcatttttgcaaatatctgcatttttgaaaaaaagctttctttttataggaaagtagtgtataatacgaaccatatttatgatgccagggtgggagtgcgtagcacggagtaatccgtaggcatcaaagtcgggggcttttgaccccgacatcatatttattttaatgcagatatcgatacaagtcatttctgacgcgaatcccggggtattatttaaggacagagtgaatatggacagttagacagtttctgacaggatcatttattaattttttgaagaatacgtcagattttatgaaaagaaaggaaaagatgtatgacacgtgaaagatatgaatctttgccgcttgcaaccttaaaagaactggcaaaagcaagaaatatgaaaggagtttcaacgctgaaaaaaagtgctctgatcgatgagatgttgaagttggatgagacggaaaagcagatgcaggcaaatgaaaaagcaaaagaagaagtacggcaggaaatgaaagaaaaaaaggaagagtcagatatcgagcagcttgacagcggaaaaaccgcaaagggtatttttgaactccatcaggacggatatggctttatccgcagcgataattatcttccgggagagcaggatgtgtatgtggctccgtcacagatcaggcgatttggactgaagacaggagatatcctgacaggaaatacaaggatcaagacgcagggggagaagttcagtgcccttttgtatgtatctacgatcaacggacttccaccggaagaagcaatgaaaagaaaaaattttgaagatctgactccaatctttccaaatgaaaggatcagactggaaaatccgggatgttccacggcaatgagagtcgtagatctgatttcaccgatcgggaagggacagcgtggtatgatcgtgtctcctccgaaagcaggaaagaccactttattaaaagaaattgcactttccgttcagaagacagagccggatatgcatatgatcattcttctgatcgacgaacgaccggaagaagtgaccgatatcagagaagcaatcgaaggtccgaatgtggaagtaatctattctacttttgatgaacttccggaacatcataagagagtttcagagatggtggtcgcaagagcaaaacgtctggtagagcatggaaaggatgttatgattctgttagacagtattacccgactgtccagagcctataatctgatcgtaccaccatcaggaagaacactttcgggaggtctcgatccggcggcactctacagcccgaagcgtttctttggagcagccagaaatatgagagagggcggaagtcttacaattctggcaactgcactggtcgatacgggaagcagaatggatgatgttgtctatgaagaatttaaaggaacgggtaatatggagctgatgctgaatcgtaaactgcaggaaaagagagtgttccctgcgattgacattccgaagtccggtacgagaagagaggatctgctgctggataaagaggagcaggaagctgcctatattatgcggaaagccatgaatggtatgaaagcagaagaggctgtggacaaccttctgaccatgttctcaagaacaaaaaataacgaagaactggtacagcagattatccgtcagaagtttatctaaaaaagtattgcaaaacaaaaaagtctgtggtacaattagaaagctgtttagagaaatttataagtaatttaaaaatagagaggtgaaaatcatgcgcgaaggtatccatcctaattattatcaggcaactgtaacctgcaactgcgggaacacttttgtaacaggatctacaaaggagaacatccacgtagaaatctgctccaagtgccacccattctatacaggtcagcagaaggctacacaggctcgtggccgtgttgataagttcaacaagaaatatggtattaaataagagcaacagatcggaggctgaggtggaatcatctcagcttctttttttgtcaggcatacgacaaaaagatccatgggatcttttcagttaggagaaaatatatgaaatcatcgaatataggtggacaggcagtgctggaggggatcatgatgcggaacggcggaagatactctgttgcagtcaggaaaccggacggggatatcgaagtggatatccggcagtacaaaagtatcattccatggaagacacctctgaagatcccttttatcagaggcatttttaattttgtggattctcttgtccttggaatgaagacgctgactttttcagcaagtttttttgaagaggaagaagaggagcttctgacagaagctgaagcgaagaaacgggaaaaaaatgaaaagatcatgatgaacctgaccgtagttctttcggtgatcatagcggcgggattattcatggtgcttccttattatttaagtgggctggtaaagcattataccgattcaagaatggtcatgactgtctgcgaaggactgatccgtgtcggattattcctactatatattgcactgatctcacggatgaaggatattcagagaacgtttatgtatcatggagcagagcataaatgcattaactgtattgagcatggactggaactgaatgtggagaatgtgcggaagagttccagacagcataaacgctgcgggacgagttttctgttctttgtcatgatcgtgagtattattttctgcttttttatcaccgcccagtcacagatcgcaagagtcctgatccggcttgcactgcttccggtgatcgccggggtatcttatgagatcattaaacttgcaggaaacagtgaaaatccctttgtgaacttactgagcagaccgggaatgtgggttcagaacatgacgaccaaagagccggatgatgatatgatcgaagtgggaatccgggcagttgaggcagtctttgactggaagaactggcagaaggagaatctgtaatgtgcagggaaaaggccggtgggcaagacgaaatgcggatgctcagagcgatgtatgctgaaggagaagagcggctccggcaggcgggaatcgaagaggcaggactggatgcgtggtatctgctggaatttgtcacaggtgtggataaggcacattattatatggagccggatcgcaggatggaacaaagcgtggcacaggaatatgaaaaagtggtgaatctgagggcagagcatatccctttgcagcatattacaggagtacaggaatttatggggcttggattccgggtcagcggagatgtcctgattccaagacaggacacggaagtgctggtggaagaagccctgaagcggctggaacagggaaaagtcccgaaggaaaaggagaccgtccgaatgctcgatctatgtaccgggtcggggtgtatcctgatcagtatcctgtattatgccgcaaaagaaaaaatacagatacagggaaccggtgcagatatttcagaagctgctttacgcattgcagaagaaaatctggatttgctggaagaaaccggaaataaaagtatggcagaacttctggaaagcgatttgtttgaacaggtggacggaacctttggaatgatcgtctccaatccaccgtatatcaaaacctctgtgatcagcggactccaggaggaagtcaggctgcatgatccgtttcttgcactggacgggaaagaagatggtctgtttttttacagaaagatcattgaagaaagcagagcatatttgcagaagaatggagtcctcctctttgagattggatatgaccagggagaagcagtttcggagctgatgacgaaagcggggtacggtcaggttgtggtaaaaaaggatctggcaggacttgaccgcatcgtctgtggcgtgtacactgagtagagaaatgtaagaagtaaaagagtaaaagagaagagtaaaggatagaaaagatgtttgacagattagatgacctgctcatccgttatgaggaagtaatgggtgagcttcaggaaccggatgtggcaaatgacccggagcggttcagaagactgatgaaggagcagagtgatctggctccgattgtagaggcgtataaagagtataaaaactgtaagcagaatgtagaggaaagtcttcagcttcttgaagaggagtccgatgaggaaatgagggagcttgcaaaggaagaactcagcggatcaagagcaaggattgaagaactggaacaggaactgaagatcctgcttcttccaaaagatccgaatgatgataagaacgtcatcgtggagattcgtgccggtgccggtggagatgaggcggcattatttgcagcagagatctaccgtatgtacgtgcattatgcggacagccgcagatggaagacagagatgatctcgctgaatgagaacgggatcggcggttttaaagagtgtgtctttatggtcacaggacagggagcatattcccgtatgaaatacgaaagtggtgtccaccgtgtccagcgtgtgccggagacagaaagcggtggaagaatccatacctctacgatcacggttgcagtgatgccggaggcagaggaagtcgatgtagtgattgacgaaaaagatatccgtattgatgtgatgcgtgcatccggaaatggaggacagtgtgtcaatacaaccgattcagcggtacgactgacccattatccgaccgggatcgtgatctacagtcagacggaaaaatcgcagcttcagaataaagaaaaggcattccgtcttctgcgttccaagctgtatgatctggaactggagaagcagcaggcatctgaggcggcagagagaagaagtcagatcggtacaggagaccgttcggagaagatcagaacctacaacttcccacagggacgcgtgacagaccacaggatcaagctgaccctgcataagttggacagtattctgaacggcgatctggatgagatcattgacagcctgatcgcggcagatcagacagccaagctggcaaagatggaagaataaagatggattcaggaaaagctgcaaaaaaaagccggatcaggacgaaccggcagaatgataagaaatggagtgaaagagatgatttcaaagaaaatggaaaatatggtggcgaacagttcggcaatccgtgcgatgtttgaagagggaaaccgccttgcaaaaatttatggtgcggagaatgtctatgacttcagcctgggcaatccgaatgtaccggcaccggaggcagtgaaaaaggcgatgatcgatatcctgaatgaagaggatccgatcgtacttcacggttataccaatagcaatgcaggatatgaagatgtaagacaagcagttgcagattctttgaatgaacgctttggcacttcttttgcagcaaagaatattaccatgacagtaggagcagcaggcggattgaatgtcatcctgaaagcactgctcaatccgggagatgaagtggtagtatttgcaccttatttcggagagtacagaagttatacgaataactatgacggagtgatcgtggagatctctcctgatacagcaacattccagccaaaactggatgagttcagggagaaactttccccgaagaccaaagcagtgatcgttaatacaccgaataatccgaccggtgttgtgtactcggaagagacgatcaaaaagctggctgccatcatggaagaaaagcagaaagagtttggcacggagatttatctcatctcagacgagccatacagagagctggcttatgacggagtagaagttccatacctgacaaagtactatgataatacgatcgtaggatattcatacagcaagtccttatctctcccgggagagcgtatcggatatcttgtgatcccggatgaggtatgcgacagtgagaagctcaatgcagcagcaaatgtggcgacgagaatccttggatttgtaaatgcaccgaccctgcagcagaaggtagtgaaagcatgcctgaatgagcagaccgatatttcctattatgacagaaacagagaagctttatacaacggactgaaagagcttggctttgagtgcatcaaaccggagggagccttctatctgtttgttaagtctccggtagcggatgaaaagaaattctgtaatgctgcaaagaagcataatattcttcttgttccgggaagttcttttggatgcccgggttatgtgcgtatggcatactgcgttgcatatgaaacaatcgtaaattcccttccgaaattcaaagaacttgcggaagagtataaataaagcagagcctgccggtttatggcaggaactttacaaagtcagaacatgatctgacagtgagaaaaggacagaggtttagacgaatggctgtaagagcagaacttttaaaaaatatacgacaggcagagccttatgtaccgggtgagcagccgcagaataaggtgatcaagctgaatacaaatgaaaatccttacccgcctgctccgggagtggagcgggtgttgcgtgagatggatacagacagattccggttatatccggatccggcagcagaagaactgaccggatgccttgcagagtattatggggtagatcgggatcaggtttttgtgggagtcggctcggatgatgtattatctatgtgcttcctgacattttttaattccgggaaaccggtattattcccggatattacctattctttttataaagtgtgggcagggctgtacaagattccatatgagacaccggcactggatgaacagttccgcattgtaaaggaagattattaccgggaaaatggtggaatcatttttccgaacccgaatgcaccgaccgcaatttatgaagaactggatttcatagaagatattctggaacataaccgggcttcgatcgtgatcgtggatgaagcatatattgatttcgcaggcagatcggcactggaactgatcgaccgttatgataatctgattgtaacgcagactttttcaaaggccagaagtatggctggcatgaggattggttacgcaatctccaaccctgaattgatccgctgtctgaatgatgtcaagtattcttttaattcttatacaatgaatcagacggcgattgcatgtggtgttgaagcagtccgggataaggaatattttgaagaacatgttcgtaaaattatagagacgagagaatgggcaaaagaagaattgcaccggcttggatttgaatttcctgatgcaaaagccaatttcatttttgcaacgcatccgcagacagatgccggcagactttttgaagcactgaaggcaaatgatatctatgtcaggcactgggattcagaacggatcggccagtatctgaggatcacagtcggtacaagggaagagatgcaggtgttatttgattttctgacgaaatatattaagggagaatagtttagatgagtgatgcattgatcaactggtttgtagtaaatctcggaggaaaggttggaaaagagctgatcctttttatcatctcgatggttccgatcctggaactgcgtggagggctgcttgcagcaggaccgacatttctgaatatcccgatgtggcgtgcgattccggtcagtattatcggaaatctgctgccgattccttttattctgcttctgatcacaaagatttttgactggatgaaaggaacaaagaggttgaagccggttgttgaaaagcttgaaaaaaaggcgatgagccagagtgccaatattgaaaagtatgagttctgggggctggttgcatttgtgggcattccacttccaggcacaggtgcctggacaggggcattgatcgcagcactgcttggaatccgtttcagaaaggcattcccggcgatcgtgatcggtgtttgtctggcagcatgtatcatgacgatcatttcttatggaatcgttggggggatatttggttaaactaacggcaggaaaaggaggcatgaacgatgctgatggaacagaatgaaaaaggaagagatacgatatggcgtgtcgtaatggcagtgacaacagtactgatccttctgatcggtattttcttcctgacaaagctttttactgcaaacccactggaaggaacctggagtgatacagagaacggaatggtacttcatatcaaaagtgacggagtgatggagatcacgcaggcactggaggcggagactgtgacagttcctgttgaatattcaatggacaggaatacaaaaaggtttgcggttcatataaaagacgaagaacttgaaaaagcggcagaagaaacgaaagatttgacagagcaggatctgagagatatcgcagatgtgatggaaggcacatatgaatacagtgtggatgaacaggtgctgacactgacagagatggaatatggaagccagaagacctttgtccgtgaagaagactgaccggacagagcttttgaaaggatgaagaaattgtatagaaatcagacaaaagagattcggatcggtgatgtagtgatcggtgggaatcacccggttgcgatccagtctatgaccaatacaaggaccgaagatgtaaagggtactgttgagcagatacgcaggctggaaaaagcaggatgtgagatcatccggtgtactgttccgacaagggaggcagcggaagcgttaaaagagatcaaaaagcagatccatattccgctggttgcagatattcattttgattaccggcttgcaatcgcagccattgagaatggagccgacaagatccggatcaatcctggaaatatcggtacaaaagaacgggttcaggcggtagttgacaaggcaaaagaatacggtgtgccgattcgtgtcggggtgaacagcggatcactggagaagccgttaattgagaaatatggcggagtcaccgcagagggaattgtagagagtgctttggataaagtgcatatgatcgaggagatggggtatgacaatctggtggtcagtatcaagtcttcggatgttctgatgtgcgtcaaagcacatgaactgattgcggaacaatgtccttatccgcttcatgtcggaattacagaatccggtaccgtatattcagggaatgtaaaatcttctgtcggactgggaattatcctgtatgaagggatcggaaatacgatccgtgtgtctctgacaggagatccggtggaggagatccgtacagcaaagctgattcttaagactctgggactcaggaaaggcggaatcgaagtcgtttcctgtccgacctgtggcagaaccaggatcaatctgattcaccttgcaaatgaggtggagaaaatggttgcagacattccactggatgatatcaaagttgcagttatgggatgtgtggtgaacggtccgggagaagcgaaagaggcagatatcggtattgccggtggaatcggcgaaggactgctgattaaaaagggacaggtcattaaaaaagtaaaagaagaggaacttctcgatacattgcgacaggagttgttgaattggaacaggtaaaaagtgaaaaagtattttttaatgtatttccgacgctgaaagtcggggaagaactgcagatgctcttttcggatgtagaagttaagaagatcacgactaattcaggtcgtgattttctgcatatacatatcctttgcaggcatctgatacagaagaagcagatctggctgatggaacagcggatcaaggaacagttatttggaagagccgcagtaaagatcgaaatcgtggaagaatttcaactgtcggagctttatacgccacaggagattctgacggagtacagggaaagtctgatcgaagagctgcggcagaccagtgtacttgctgcaaatatgtttgcaagggcagatctccggtttgaagagggaaatctgatccacctggaactgctggacacgatcgtatcagaaggacggaaagaagaaatcgtcacactggtggaacgggttctgcaggaacggttccgcatagatgcaaaattactggtagcttataaagagccggatcaggaaggcacaagagagtacgatgagcagcggattcagcaggaaatcaatgcgatctttgaacgtcgtgcaaggcagcgtggtgaagaacctgagagggcagcggaaaatcagaaaataggatcagatacaaagaagaggcaggccgaaccgggtgaaaaggcagcaggtggaaaagaaaaaactgctgcaggaaaggaaccatcaggcaggagaaaagaatttcagaagaaggaatttaaaaagaaagattatgtacgcccactgaagctgggagatgatccgaacctcatctatggcaggaattttgaagatgagccgctccgcctggatcaggtcgtggaagaaatgggagaaattacctttcatggtaagatcatcagtctggatacccgtgagatcaagaatgaacggacgatcatcatttttgcggtcagtgattttacagatacgatcagcgtgaaaatgttcattaaaaatgagcaactggcagagattctcggaagtctgaaaaaaggcggctttgtcaagatcaaaggagtcactacgattgataagtttgacggggaactgacgatcgggtctgtcaccggaataaaaaaaatcggtgatttcacggtcaaacgagaggatctgaacccgttaaagagagtggaactccactgccataccaaaatgagtgatatggatggtgtttcagaagtaaaagatatcgtaaagagggctcatgactggggacaccctgctattgcgatcacggatcacggggtagcacaggcattcccggatgccaaccactatattgagacactggacaaggacgatccgtttaaggtactttacggggtggaaggctatgtagtagatgacctgaccaagatcgcggttcatgcaggaacgcagacgctggatgacacgtatattgtgttcgacattgagacgaccggttttagtgccatccgggataagatcattgagatcggggcagtgaaagttgtaaacggagagatcgtggaccggttcagtacgtttgtcaatccgcagcgtccgatcccgtttgagatcacgaatctgaccagtattacggatgaaatggtactggaagcggatccgattgagaaggtacttccacagttcctggaatttgtcggggatggagtcctggttgcccataatgcttcgttcgatgtgggatttattgaacagaactgccggtatcaggagatagaatacagatttacttatgtggatacggtggcaatggcgagagttcttttgccgacgctgtcaaaatataagctgaacctggtggcgaaggcactggggatttccctggaaaaccatcaccgtgcggtagatgatgcaggggcgacagcggagatttttgtgaaatttgtagagatgctgaagaaggatcatattacagatcttaagggcatcaaccggtttggagagcggaatgtgaatgcaatccgcaaaatggcaacgcatcatatcatcattcttgcgaaaaatgacatcggaagatacaatctgtaccagcttatttcggaatctcatatgacctattatggtagacggccgagaatcccgaaaagtctgctcaatgagcatcgggaggggctggtcattggaagtgcatgtgaagcaggtgagctgtataaggcaatcctggaagaaaggccggcagaaaccattgcggaacttgcggacttttatgattattatgagatccagccgatcggtaataaccggtttatgatcgagagcaacaaggtgaaaaatgtcaattcagaggaggatctgcaggagatcaaccggaagattgtagaactgggtgagcagttcaaaaagccggtcgtggctacgtgtgatgtgcatttccttgacccggaagatgaagtctaccgaaggatcatcatggcgggaaaaggatttgatgatgcggatacccagccaccgctgttcctgcggacaaccgatgagatgctggaagaatttgcctatcttggatctgcaaaggcaagagaagtggtcattgacaacccgcagaagatcgcaaaaatgatagaaaagatctcgccggtcaatccgaacaaatgcccgccggtcattcaggattcggatcaggaactgagagatatctgttacaggaaagctcatgagatgtacggggaagacctgccggtacaggtttcttccagactggaaaaggaattaaattccattatttccaacggatatgccgttatgtatatcattgcacagaaactggtatggaagtccaatgcggacggatacctggttggttcacgtggatcagtaggatcttcgtttgtagcaacgatgtcaggaattacggaggtaaatccactcagtccacattattattgtgaaaaatgtcattacagtgatttcgattctgaggaagtacgtgcttttgcaggaggctgtggatatgatatgcctgaccgtatgtgtccgaagtgcggagcgaagctgatcaaggcgggatttgacatcccattcgagacattccttggatttaagggggataaagagccggatatcgacctgaacttttcaggagattatcaggcaaaagctcataaatatacagaagtattgtttggtgagggacatacgttcaaagccggaacgatcggaacactggcggacaagactgcctacggatttgtgaaaaattattatgaagagcgtggacagaggaaaagaagatgtgagattgagcgtgtgacggaagggtgtaccggaatccgcagaagtaccgggcagcatccgggaggaatcgttgtacttccgcatggtcacagtatcaatgagtttacaccggtgcagcatcctgccaatgatatggagtgcgggatcactacgacccattttgattatcactccattgaccataaccttttaaagctcgatattctcggacatgatgatccgaccatgatccgaacgctggaagattatatcacctcggatgccatgtccaatgagtacaatgcagagcatccgtttattgcgacagagatccccctggacgataagagggtgatcgagctgttccacggaacagaagtactgggaattaaaccggaggatatcgacggatgtaagatcggaagtctaggaatcccggagtttggtacagatttcgttatccagatggtgcaggataccaaacctcagaccctgtcagacctgatccgtatttccggtctgtcccacgggacaaatgtatggcttggaaatgcacaggagcttgtcaaatcagggacggcaacgatttctaccgcaatctgtacccgtgatgatatcatgatttacctgattaatcagggagtggaaagtgctctcgcatttacgatcatggaaagtgtgcgaaagggaaaaggactgaaaccggaatgggaagaggcgatgaaggcacagaatgtgccggactggtatatctggtcgtgcaaaaagatcagttatatgttcccgaaagctcatgccgcagcttatgttatgatggcataccggattgcatactgcaagatcaattatccgctggcatattatgcagcttacttcagtatccgtgcggacgcattctcttatgagatcatgtgccaggggagagagaagctggattattatatgaaagattataagcgacgcagtgataccctgacgaaaaaagagcaggatacgatgaaagatatgaagatcgtgcaggagatgtatgcccgtgggtttgagtttgttccggtggatctttataaggcgaaagcaaaaatgtttcagatcgtggatggaaaactgatgccgtcctttgcaagcattgaaggcatgggagataaagctgcggaggcagtcgaagaggcgggaaaggacggaccgtatctgtcactggatgatttccggcagcggacgaaagtcagcaagacagtgatcgatctgatgtcggagctgggactgtttggaaatctgccgaagagcaatcagttatcgttgtttgatttttaaaggatgctgtgctataatgtgcataacgcttttgcggagtaaagtatagtggagggaatagagaatgtacgatttcgatgaaattatgaagacggatcctgagattgcagatgcgataaaagcagagatggagagacagaactcccatattgagctgatcgcatcagagaactgggtaagtaaagcagttatggcagcgatgggaagtcctttgacgaataaatatgcagagggatatccgggaaaaagatattatggcggatgtcagtgcgtggatgttgtggaagatcttgcacgagagagagcaaagaagctgttcggctgtgaatatgtcaatgttcagccacattccggtgcacaggcaaatatggcagttatgttcgccatgcttgagccgggagacaagattatgggaatgaatctggatcatggcggacacctgactcatggttcaccggttaatatgtcaggaaagtattttgatgtggcacattatggtgtcaatgaagatggtgtgattgattatgatgaggtactgcggattgcaaaagagcatcagccgaagctgatcgtagcgggagcaagtgcttatgcaagaacgatcgatttcaagcgtttccgtgagatcgctgatgaggtgggagcatacctgatggtagatatcgcacatatcgcaggactggtagcaacaggacttcatccaagtccgatcccgtatgcccacgtaacgacgacgacaacgcataagacacttcgtggtccaagaggcggaatgattatgtgcagtgaggagatgaacaaaaagttcaacttcaataaggctgtattcccaggcatccagggtggtccgctgatgcatgtgatcgcaggaaaggcagtatgcttcaaagaagcacttcagccggaatataagacttatatggagcaggttgtcaggaatgcaaaggctctttgcaatggcttaaagagcagaggagttaagatcgtatcaggtgatacagataaccatctgatgctggtagatctgtccggtacagatatcagcggaaaagagctggagaagcgtctggatgatgctcatgtgacagccaataagaatacaatcccgaatgatccacgttctccgtttgtgacaagtggtgtgagactgggaactccggctgttacgacccgtggcatgaaggaagaggatatggataagatcgcagagatcatcgctatggtgatcgagagcgaagataatgtagaaaaagcgaaagccatggtagctgagcttacagcaaaatatccgctctgttaagaagacagaatctgttaagaacaaataaaagagaataaaaagaatacggaggtagcagtttgaagctgattcatttatccgatctgcatattggaaaaagagtgaacgagttttccatgctggaagatcagagatatattttagatcagattacctccatcatagagaaggaagcaccggatgcagtattgatctgcggtgacatttatgataaacccgttccgccctcagatgcagtgagggttctggacgggtttttgacttctctggcacagaaaaaagtgccggtttttctgatcagtggaaatcatgattcggcagaaagactggcatttggttcgcagctaatgatggaaagccaggtaatcttttcaccggtctatgatggagaaccggtgaaatattgtatgaaagatgaatatggggaagtgtggatccatcttcttccatttttgaagccggcagtggtacgtcatgtatttcctgaggaagagattacttcttatcaggatgcggtttcctgtgcggtgaagcatatgcagattgatccgacaaagagaaacgtgcttcttgcacatcagtttgtaaccggtgcggcaagatgcgattctgaagaagtttcggtcggaggtgtagatcagatcgcagcagagacatttcaggagtttgactatacagcactgggacatatccacagtccgcagaattttaaaaatggaaaaatgcgatattgcggaacaccactgaaatattctttttccgagtgtggacagaaaaagtcagtgacggttgtggaactgaaagaaaaaggaacaaccgagatccgggagatcggtcttttaccgctccgggatctgaggagtatcaggggaagttatctggaagtttcatccagggaattttatgaagataccaatacagaagattatgtcaggatgattcttacggatgaagaggatgttgtcgatggaatgcagaagttgcggacgatctatccaaacctcatgcaattagaatatgataatcagaggacaagagaagcaaaagagatcacagaggcacaggtggcagaagagaaaagtgagctggaatactttgaagaattttttgaacttcagaataaccatcccatgttacaggaacagagagagtttgtcagtggactgatcgggaaactgaaggagaatgaactatgaaaggagagatcagatgaaacctgagaaactggtcatcagtgcatttggaccatatgcaggcaggacagagattgattttacaaagctcgggggacagggaatctatctgatcaccggggatacaggggcaggaaaaacgacaatttttgatgcgatcacctttgccctgtacggggaggcaagtggtcaggtcagagattcagccatgttccgcagtaagtatgctgcggaagagatagaaacgtatgtggagtttcttttctcgtggcgtggaaaatcttatcaggtgatacgaaatcctgaatatctggcacgaaaaaagaggggaacgggttatacagtaagaaaatccgatgccacgctagtgtacccggatgaacgcctgccggtaacgaaagcgaaagaagtcaccagggcagtcacggaacttctgggactggattacaggcagttcacgcagatcgccatgatcgcacagggagatttccagaagcttctgctggcaggaacagcacagcgtggagagatcttccggcagttgttccatacagaattatatcagagccttcagttgaagctgaaagatgcggtgaaaatgcaatggaagcagtatgatgagctgagaagaagtatcagccagtatctgaacggaatccgttacggacaggaggcagaagaactcacagagaaactggaagagatgaaaaagtccgggtttgatggaagagttgtggaaggactggagctgttactggaactgacggagagagaaaaagaatttctgatgcagcttgagcagaaagaaaaagtgctggaagaaagcatttcagaggcagaaaagaaactacagaaatgtatgcagaagcaggaactggagtcttctctgcggctgcaggaagagcagagagaaccgctcctgcaggcagccgggaaagcagaagaagagcggaaaaagaatccggaactgcaaaggaaggcggaagagctggaaggagagatccgtaaaatccgggaacggatggaaagaatcctgaggattgaaacgctggggcagaaaacggaaaagctgggagaagaactggaaaaagtgcagaaaaagtgtcaggagcatactgcacaaaaagagcagcttcaaagagaactggatcgttttggagctttggaggcagtgagagagaaatattgcggacagcttgcaaatctgcaggaacaggcagaccggctggaatctgcaaaagatgcatatggcgggaggataaaaaaagaagctgcactgacagaaaaaatgaggcagttgcaggaagaactggataagcggaaggaaatgctcaaaaaaatgggagaggagatagaaaaatccggggatgccggggagaaccgtctgagtctgtatcagaaaaagaataatctgactgtacagttgaatcaggcagaccggctgatcgaggcgaaagaagaacaaagctcgttgcagaaaaagctagaatttacaaccggacgttatttgaaagcaagagaaaactatcttccggtgaaagaagcatacgaaagagagttccgtctgttcctggatacgcaggcagggattcttgcagaagggctggaagagggaatggcgtgtccggtctgtggttcagttcatcatccggctcttgcagaaaaatgtggcgaggaaatttccaaagaaagtgtagatcagaagaaggcggcagcggatgaggcagaaaaaaaggtcagaaattgcagtgcaatggcaggcagcctaaaagaacaactggagcagctgaagaaaaaagcagagcagatagaaaaagatgcaggctatcatctggaagatgtagagcgggtaaaagaacggctgcagaaagaaatcagaaactgtagagaagaactggagaaagcagaggaggcacttgttcagagagaaaagcttacgaaggcagaagaacagaaaaaagcagaacagcttcaggtagaacagttacttcatgagcaggaaaaaaagatggcagaagtccaggcacagaagaacagtgaaaaagaaagcctctgtcagatccttatgaaactggcagaaaatgagaagagtgaatctgactcactgaagaataaagaaatccaggaactggctctatggggaatggaactgctaaaatcccgcatggaagaaaccatagaaggaaaatctgctgtagaacaggaaatccaaagacgggaggagctgaaaaaagaagaagggcgactccgggcaatcgtggagcaggagaaagaaaagactgtgcaatttcaggcagagaaaaaatctgtagaagaacggattaaagaagagcaggaaaagaatggggctgagagtgaaagagaggaaatcttaaaggagcagatcctacagaagcaggaagaacagaaaaagctgaaagctctacagcagaaaaaccagcaggaatatgagcagattctgcagaaaaaagcagaaaatgaggcctcgattcagacaatccgggtacagcttgaacaactggaagatgtaaatgaagaagaaatcctgaaagagaaaagccggatgacagaagaaaaaagccagatggcagaagaaaaaaaagaactttatgtcaggtattcaggaaaccgggaaatctatgataaagttaatgtgcagagagatctgctggaagaagtagaaaagaaatatgtatggatgaagtcacttgccgatacggcaggcggcaatctgaatggcaagcagaaagtagaactggagacctatattcagatggcatattttgaccggattttacgacgtgcaaatctgcgtttcatgacaatgagcagtggacagtatgagttaaaaagacagaaagcaccggaagataaaaaaggaaaatccggtctggaattaaatgtgatcgatcactacaacggcagtgagcggagtgttaaaaccctgtccggtggagagtcattccaggcatctctgtcgctggcactggggctgtcagatgagatccaggccaatgcgggaggaatctgcctggaggcaatgttcgtggatgaaggtttcggttctctggatgaggaagcactggggcaggcaatcaaggcactgggaaatctgacgcagggaaaccgcagtgtggggatcatttctcatgtggctgaactgaaagaacggatcgaaaataagataatcgtgacgaaagagcggggcggagaaaaattaggcagcaggattgaaattatataatttcatgctttaactcggaaaagtattatgatatacttaagagaagcgaatgcttaaaaaggaggtacaaaggaatgatatgggcaaaggaagaaactctgccaagagaagagatcgaaaagatccagttagataagctgaagacgacggtcagctatatttacgacagagtaaaaccttatcgtgataagatggatgcagccggagtgaaaccggaagatattcagacgctggaagacctgaaaaagctgccttttacatataaagcagattttcgagatcattatccggatggactttttgcggtagataaaaaggaaatcgtacgttatcatgcaagttcaggaacaaccggcaagccaactgtggtcggatatacaagaaaggatctggatatctggctgaataatgtggcaagactggcctgtatgggcggtgccactgcggatgatgtggcacagatctcatttggatacggtacatttacaggagcactggggcttcatggtggactggaaaagatcggagcggcggtgatcccgatgtcttcgggcaatacaaataagcagatcatgttccttcaggatatgggggtgacccttcttgtggcaacgccatcgtatgcactgcatttaggagaagaactgcgtcaccggggaattgacccttctaaggatctgaagatccatatcggtttgttcggcggggaaggcatgacagagccgatgcgtgatgagatgcataaagtctggggcgatcagtttgtctgtacccagaattatggtatgagtgagctttgcggaccgggagttgcaggggaatgtacggagctttgtggtatgcatattaacgaagactggtttatcccggaagtcattgatcctgagactgaggaggttcttccaccgggagaacttggggaactggtagtgacctgccttggaaaagaagcacttccgcttgtaagataccgcacaggagatctgacaagactgatgtatgaaccgtgtaaatgtggaagaacgacagtcaggatggagaatctttcaggacgtgccgatgatatgcttgtgatccgtggagtgaatgtattcccgggacagattgaggaagttctgttcaagatcgatgagatcggaccacattatgaaattctggtagagcgtaagaaccgtctggatgtgatgaccatcacggtagaactgattgatgaccgtcttctggacagttatggacagttgagtgaactggagaaccggattaagacaagattaaagtcccagcttggacttgcaacacagatccggctggttgcaccgaactctctgcagcggtttgagggaaaagcaaaacgtgtgacagatttacgaaaggatggactgtaaaatggcagaaaaagtaattatgctcggaaatgaagcgattgcccgcggagcatacgaggcgggagtaaaagtttcttccgcatatccgggaactccgagtactgagatcagtgaataccttgtccagtacagggatgatgtatatgaagaatgggcaccgaacgagaaggttgctacagaggtagcggtaggtgcaagcatcgcaggtgtgcgttccatggcctgtatgaagcatgtaggactgaatgtggcagcagatccgctctattcagtatcttatatgggagtaaacggtggacttgttcttgttgttgcggatgatccgggactttacagctctcagaacgagcaggatacaagaatggttgcaagggcagcacagatcccggttatcgaaccttcggacagtgcagaggcaaaagatttctttaaggcagcttttgaactcagtgagaaattcgaccgtccgtttattttcagaacgacaacgagactggcacattcacaaggactggttgagctttgtgagcgtgaaaatatagaagataaggaatatataaagaatattcagaaaaatgtcatgatgccgggaaatgcaaagcagagacatattgagatcgaacgtctgaacagggaactggcagaggcagctaatacccttccgatcaacagagttgagatgaacgataccaagatcggagttattaccagtggaatcccatatcagtatgtaaaagaagcattgccggaggcgtctgtactgaagctgggaatggtgaatccgcttccaagaaagctgatcgaagattttgcagaaaaagtcgatacactctatattgtagaggaactggatccggtgatcgagacgcaggtaaaatcctggggaatccaggcgattggcaaggaaatcttcacagtacagggagaatacagtgccaatatgctccgtaaagcgattctgaagcaggaactggaactgaaagagcctgcaaaagcaccgggaagaccgccaatcctctgtccgggatgtccgcacagaagtgtattctttgtcctgaaccgtctgaaaatgcatgcagcaggtgatatcggatgttatacattaggtgcagttgcaccgctgagtgtcatcgatacaacgatgtgtatgggatcaagtatttccacacttcatggaatggagaaggcaaaaggaaaagagtatatcaagaactgggttgccgtgattggtgattctactttcatgcatacaggtgttaattcactgatgaatatggtttacaacaaagcgaccggaacagtgatcatcatggataattccacgacaggaatgaccggacatcaggatcactccgcaaccggaaagacattgcagggagatccgacttatgccattgatattccggaattatgtcatgcagtcggagtgaagcatgtcaatgtagtgaatgcatttgatatcgaattgcttcagaagacgattaaagaagaagtggcaagggatgaagtatctgttatcatcacaaagactccttgtgttctgcttgacaagagaaagaagccattgtatatggcacatgaagatcagtgtaagaaatgcggtctctgcatgaaaccgggatgtccggccatgacaaagaatgcagacggaagtgttcatattgatgatacgatgtgtactggatgcggactgtgcgaaaaactgtgtaaatttaatgtgatagaacttgtaaaggagggcgaataagatggcagtaaaaaatattatgatcgtcggtgtcggcggacagggaacccttcttacgagccggatcctgggagggctgaccatcgcaggcggatatgatgtcaagctttcagaagtacacggcatggcacagagaggcggaagtgttgtaacatttgtccgttatggtgacaaggttgcagagccgatcgtagaagagggacaggcagatgtcctgatcgcatttgagagactggaggcactccgttatgcacattttctgaaaaaagatggggctctgatcgtaaatgactggagaatcgatccgatgccggttgtgatcggaaatgcagaatatccggatcatatcattgaggatctggaaaaggaatacaaagtatataaagtagatgccacagaagaatccagaaagcttggaaatccacgagtctttaacctgatcgttcttggaatcgccgcacagcatatggatttcacaaaagaacagtggtatgaagtgatcgaaaagactgtacctccgaagacgattgagatcaataaaaaggcatttgaggttggatttaatctttaaatatatgtgcagggaaaggagaaaaaagatgatcagacagctttcagtatttgtggaaaaccagccggggagtatgatgagagtgacttctgtattgacagatagccatattaatatccgtgcgatctccacatttgatacaccggaatttgggatcatgcgtctggtagtagatgagccggagtgcgcaaaagaaagtctgacagcaaaagggtttgttacaaggatcacggaagtagtcggggctgagcttaaggatgaaaaaggaaacctgaaccggatgcttacgatccttgcagatggagagatcaatgtaaattatatttattcgtttgtgatacgcgagggaaaagcaccggtgatcgtattccatacggatgattttgacaaggcgcagaaagtcctggagaaggcagacgtgaaactggtagaggaagaagatttatagaaaaaggagaagcgaagatggcggcagtatctttagaaaattgggaagaacggattcgtgatcccaaagtggagtgtatgagcagtgacgagatggcagcactgcagagcaggcgtcttgtagatgtggtgaaaagggtatatgaccatgtggatttttaccataagaaaatgaaagagatcggtgtagagccgggggatatccgctccattgaggatatcggcaaacttccttttaccaccaaggaagacctgagagccaattatccattcgggcttcttgcaatcccgcaatcggatgtagtacgtgtgcagggaacttccggtacgaccggaaagctgacgatcgcaccatattcacagaaagatgtggaagtctggggcgaatgtgtagcaagatgtctgacgatggcaggacttaccagggatgacatcctgcacgtatgttatggatatggactttttaccggtggtctcggactggattttggagcaagggcgttaggtgcaatgacgatcccgatgtcagcaggaaataccaggcgtcagatgatggtcatggaagatcttggagcaacagcttttgcatgtactccgtcttatgcactttatcttgctgaatccattcaggaggcagggctgacagaccggctgaagatcagagtgggaatccatggagcagagccatggacagaagagatgcgtaaaaaaattgaaactatccttcatatcaactgttttgatatctatggattatgtgagatcaccgggccgggtgtggcaatggattgtatccatcacgcaggacttcatgtaaatgccgatcatttttatcctgaggtactgaatcctgcaaccaatgaagcctgtgcagacggggaaaccggagaacttgtctttacaacgttatccaaagaggcaatgccgcttctgcgttaccgcacgaaagatctgaccagcattgaccatagccgctgtgcctgcggaagaacaactccgagaatttccaaatttaccggaaggacagatgacatgaaggtcatccgtggagtcaatgtattcccaactcaggtcgagacagccctgcttggtattggaggtgcagtagctccgcattatatgatgatcgtagacagagaggataatctggatgtacttactgttatggtagaagtagatgagagtatgttctcagatgagatccgtaaactggatgcgctgagagataagatcgcagcaattctcaagacagccctcggagtatctgtcagagtgaaactggttgagccgaaatccatccagagaagcgaaggaaaagcagtccgtgtgatcgacaacaggaatctgtagaaaggggaaagaaagaatgggaatcacaattcagcagttatcagtttttctggagaacagagaaggccgtcttgatgaggtactttctgtactggcgggaaatgatatcaatatcgtagcattaagtcttgcagatacttccgaatacggaatgctgcgtatgatcgtatcagatccgaataaaggaaaagcagtcctgaaagaaaatgggattacctccatgctgacagatgttgttgcactgagagttcctcatgagaccggttcgctgagccgggcaatgcatcagatcgtggaaggtgatgtaaatattgaatatatgtatgctttcgctaacggggcagatgcttctgcagttcttaagaccgatgatccggcaagggttgttgacattttaagagggagtggatttgatgtctgggaagcggatcaggcgtatgtatcgaatataagtgggacgtgatctgattaccggagcagaggctctttatataatctgttaaaaaagaaaaatgaaatagaaatcccccagcaggtcacagacgatctgccgggggatttttaatcttatttcctgtattacttttaatattaaattcgagcttatctataataattaaaaggtacaatgaatatttgattaaagttttactacatttgttgcctgaggtcctttagctccttctgttacatcgaactctacagcctgaccttcttcaagtgatttgaatccatccatcaccagtcctgaatagtgaacgaagatgtcatttccttcagagtcggagatgaatccataacccttctggttgttaaaccattttactgtacctgtcattgttgttgccctccataaaaaaataagttgttagaccgggaatcaaaaacccgataccgttttagaatagcatatttaacaataaaagtcaatgcaaatctgattgaggttgtaaaattacacaaaaataatatgctaaaattatgcgaaatgccgaaagtgattatttgtgaaaataaatgactgaaaatgattgactgtgactgaaaatgattttattataagggcagagaaatgaaagaaggaggtgcagagatgcttacagaagagcggtttgccgagattctgagaatgctcggagaggaaaaatcggtcacagtgcaggaacttacggagaggctggcaacttcagaatcgacgatccgaagagacctgacagcacttgcggaaaagggattactggtgaaagttcatggtggggcgacggctttggagatggattatacaaccaaagatgtagaaatcacatcgcggatgacacagaatgtagatgaaaaatccctgatcggaaagtatgcggcatccctgatcgagaaagaagattttgtttatctggattcgggaagcagtattgcacagatgttaaaatacatgaccggcagtggggcggtatttgtgacgaatgggattgcccatgcacagagcctggcaaggaaagggattaccgtctatctggttggagggatgtttaaaggagcaacggatgcagtgatcggaagtcaggctgtggaggatctgaaaaagtataattttacaaaaggattttttggaacgaatggtgtggataaaaagcatggttttacgacgcccgatccggcggaagcgatgataaaaaaagctgccatggaacggtgcagaacatgctatattctggcagattcaagtaaaatcggtcaaatcgcgccggttacgtttgcaaaattcgatcaggcagaattaatcactacagaacttacggataaggatctgaaaaaggaaaaaaatattgtagaggtgaaagcatgatttatacagtaacatttaatccttctcttgattatgtaattcaggtcgatgacctgacacttggggaagtgaacaggacaacatcagaaaaaatttatccgggtggaaagggcaataatgtatccgtaatcctttctaatctgggacacaagagtaaagctcttggattcaaggccggttttaccggagagcagatggaaaccatgctggaagaattcggatgctatacggattttatcccgctggaagaagggctgaccagaatcaatgtgaaagtgaaatcaaatgaggaaagtgagatcaacggacagggaccggttattacagatacagcgatcgaggcactctatcagaaactggataagctgacggcaggagatgtacttgtacttgccggaagtatcccgaatacacttccgggggatatgtatgaacggatcatggaaagacttcagggaaaagagatcaggattgcggtggatgcgacaaaggatctgctggtgaatgttctgaaatatcacccgttcctgatcaagccgaataatcatgaactgggtgagatcttcggcaaagtactggaaagtgaagcagatattgtggagtatgcaaaaaaacttcaggagatgggagcagtcaatgttctcatatcgatggcaggggacggtgcgatcctggtaacggaagacggaaccgtaagcagtaaaaaaccaccaaaaggaacggtggtcaactctgttggagcaggggattccatggtagcaggattccttgcaggatggctgaataccggtgattatgaaaaggcactggaactggggacagcagcaggaagtgcgacagcctttgtatcctggcttgcaaccagagaagaaattacagagaaactggaacgtacggaaaaagagtatggtatataggaggaaatgagtatgaggattacagatttgctcaaggcgtgcagtgtggaactaaatggtacaccgcagacgaaagaagagaccatcgaacagatggtagccctgatggaaaagggcggtaatgtgacagatgttgaaaaatataaagcgggggtctttgcccgtgaggaagaaggaacgacgggaatcggggaaggaattgcaatccctcatgcaaagaccgatgcagtcaatgcaccggggcttgcagcaatggtgattcctgccggtgtagattatgatgcactggacggacagccggtggatctggtatttctgattgctgcaccgaatacagaagacaatgtacatcttgaagtactgagcagactttccatgcttttaatggatgaatcctttaagcagaatcttctgaaagcaaagacagtagaagaattccttgcagttgtggatcgggcagaaaatgcgaaaaatgaagcagaggaagagaaggcagtgaatgtaccggacagtggatatcgtgttctggcagtgactgcatgcccgaccgggatcgctcacacatatatggcggcagagagtctggaaaatacagcaaaagagctgggttatacgatcaaagttgagacaaatggttcgggtggagataaaaatgtcctgacagcggaagaaattgctgcctgtgacggaatcatcgtggcagcggacaaggaagtcagaatggcacgattcgacggaaagccggtcattgtcacgaaagtagcagacggaatccataaaccgcaggaactgatcgaagacatcattaatggcagggcaaaggtatatcataatgatggcaaaggagaagagaacgccggcataggcgatgagagccttggaagaaagctttataaagcactgatgaatggagtatcccatatgcttccgttcgtcatcggtggcggtatcctgatcgccctttcatttatctgtgacggggcaaatgcgggaacagatgtattcggaaatggaactgcacttgcaaagttttttaatacagtcggaaatacagcgtttggaatgatgttcccgatccttgcaggatatattgcgatggcgatcggggaaagaccggcactgatgcccggtattgtaggcggtctgcttgcaaaagcaggaacaagtattttcctgccggaagatcagtgggtttcttcaggatttttcggagcattgatcgcgggttttgtagcaggttatctgatggtcctgatcaagaaactgttagaaaaacttcctcatgcacttgaggggacaaaaccggttctgctgtatccgtttttggggatcgtagcaatgggagcaatcatgatctttattgtaaatccaccgatgggagcattcaatacatggcttaataatgtcctgacgaacatgggagagggcagtaagatcacactgggagcagttcttggcggtatgatggcaatcgatttcggaggaccattcaataaagcagcctatgtatttggcacagcgtcaattgccagcggacagttcgatatcatggcggcagttatggcaggtggtatggttcctccgctcgcgattgctctggcaacgactttctttaagaaccgttttacaaagagtgaacagcagacaaccgtgacaaattacattatgggactttcctttatcacagaaggagcgattccgtttgctgcatcggatccgctgagaatcatcccaccatgtgtggttggttcagcaattgcaggagccctttccatggcatttggctgcggttcaagagcacctcacggaggaattttcgtaatcggtattatcgatcatggtccgatgttccttttagcaatcctgatcggagcagttgtgggaatggcaggaatcgttttgttgaaaaaaccactgaaagctgattgaaaaatgatgggatgtgttatataatgaacgcaacgtcttaataaaaggaggatataactatgaaagaatttaaatatgtggtaacagacccggaaggaatccatgcaagacctgcaggaatccttgtaaagcaggcagcaggatataagtcagcagttacgatcgtaaaaggcgagaagagtgctgatgcgaagagaatcttcggagttatggggcttggtgttaagacaggcgaagaagttacgattaaggtagacggagaggacgaagagacagcaacagcagaattagaggcattcttcaaggagaacttataattatgataacaattcaggggaaaagcgtgtttggcggtgtttccattggaaaactgatgttctataagagaaatgaaaaagtcatcaaaagagagcatatcagtgatgcagatgcagaatggaaacgctttgaagccgcaaaaggtcaggcagttgaccagttaaaagagctttatgagaaagctctggaagatgtgggagaagcaaatgccatgatctttgagatccatcagatgatgcttgaagatctggattatcttgaatcaattgaaaatattatccgttcccaggaagtaaatgcggagtatgccgttgcgacgacagcggataactttgcacagatgttcgcatcaatggatgatgcttatatgcagggaagagcagccgatgtaaaagatgtatcggagcgtgtgctggatattctctgtggagtcagtgcaggggtaaaagagatgactgagccgtgtatcattgcagcagatgatcttgctccaagcgagacagttcagctggataagagtaaggtacttggatttgcgacgatgtacggttcatctaattcccatacagccatccttgcgagaaccatgaatatccctgcagtgatcggtctgggagaaactctttcatctcagtatgacggaaagatggcagtgattgacggatttacgggaatcctctatgtagatccagatgaagagacacttgccagaatgcaggagaagcatgcaaaggatctggagcagaaagagcttctgaatcagttaaagggaaaggaaaatgtgaccaggagcggtcagaagatcaatgtttatgcgaacattggaaatgtttccgaccttggagcagtacttaaaaatgatgcaggtggaatcggtctgttcagaagtgagttcctttatcttgagaacagcacatttcctacagaggagcagcagtttgcagtatacaagcaggttgcggaaagcatggcaggaaagaaagttatcatccgtacacttgatattggagcagataagcaggtagattattttaatcttgacaaagaagagaacccggcactgggatacagagcaattcgtatctgtctgacaagaccggaaatcttcaagactcagttacgtgccctttatcgtgcagcagtatatggaaatctgtctattatgttcccgatgatcatttctgtaagtgaagtaaagaagatcaaagagatcattgcagaagtgcaggcagaactgaaggcagagggcatcccttataaagaggatgtagagcttggtgtcatgatcgagacaccggcagcagtgatggtaagccgtgaacttgcgaaggaagtggatttcttcagtgtgggaacgaatgacctgacgcagtatacactggcgatcgaccgtcagaaccagaagctggatacattttatgatccgcatcatccggcagtgcttgccatgatcaaaatggcagcagacaatgcacatgcagagggaaaatggatcggtatctgtggagagcttggtgcagatcttgaacttacggaagaatttcttaagatgggactggacgagctgtctgtatctccggcacttgtattgccgctgagaaagaggatcagagagtgcgaataagttattgattttgcagaaagaagattaccgaaccgggggattgagatgtctttccggggcggttttcttctttttttcttttcgcgactttcttttagaaacttaaaagaaaaataagttgtataaaagagaaaatgcgattatgataataataacatgactgctcatattatgaatacaaaagagaagcagggaaaggagttatatggaaaaagaagtttttctgtggcttggactgatgatcctatttcttgttgtagaacttgccacagtcggactgaccagtatctggcttgccggaggtgcgttgatcgcattatttgttgctcttgccggaggaacagttgcatggcagtgtattgcatttatcgtagcatcagttctgctcctgctttttacgagaccttttgcaacacgatatatcaacaggcatcatgaaaagacgaattgtgatgacctgatcggcaggacagtcaaggtaacggagcaggtggataattatgaacagaccggtgcggcatttgccaacgggctggaatggactgccagatcagaaaaagacgatcagaagatcgaagcaggcagccttgcaacggtgacggcaatctccggtgtaaaattaatcttaagaccggttaaggaggaaaaagaatcatgggattagctattttaattgtgtgggtgatcatacttggaattgcgatcttactgatcgtgagcaatatcaagattgttccgcaggcacatgcgtacgtagttgaaagacttggaggatataaagaaacctggggtgtaggacttcatttcaagatgccgatcctggatcgtgttgcgagaagagtctcactgaaagaacaggtagttgactttgaaccgcaggcagtaattacgaaagataatgttacgatgcagattgataccgtcgtattctatcagatcactgacccgaagaagtatgcatatggagtagaaagcccgattgctgcgatcgaaaatctgacggcaacaacactgcgtaatattatcggtgatctggaactggatgagacactgacttcccgtgagacgatcaactccaagatgcgtacgatcctggacattgcgacagatgaatggggaattaaagtaaaccgtgtagaattgaaaaatattatgccgccgaaagcaattcaggatgccatggagaagcagatgaaggcggagcgtgaacgaagagaggcaattctccgtgcggaaggtgaaaagaaatctacgatccttgtagcagaaggtgagaaggagtcggtgatcctggaagcagaagcatccaagcaggcagcaatcctgaaagcggaagctgagaagcagaagcggatcaaagaagcagaaggtcaggcagaagccatccgtactgtacagaaagcgactgcggaagggattgagtatatcaaggaagctggtgcggatgaggcagtgctgacactgaagagtctggatgcatttgcgaaagcagctgacggcaaggcaacaaagatcattattccttctgatctgcaaggcattgcagggcttacgaagaccatcgcagaagtagcacgcccggatgtgacagaaaaggtggattaattggaatcgggagaaaaagttgtcaggatctcagtcagaaatctcgtggaatttattttaaaagaaggcgatattgataatcgtattacggcaggaactgcggaaaaggatgcgatgttgatgggaagccggcttcaccggaagatccagaaaagtatgggatcgggatatcaggcagaagtaccgctgaaaatttctgttccctgtcaggaatttactctgaggatagaaggcagggcagatgggatcattgcagatgaaacttcagatggaaagctgcatcaggtgacggtggacgagatcaagggagtcctgagaaatctggaacagattcagaaaccggcaggagtacatctggcacaggcaaaatgctatgcatatatttacggaaaagaaaaagaactggaaaagatcagtatccagatgacatattgtcatctggatactgaagaaataagacggtttaaagaagagtatacactggaagatctgaaaagctggtttaaagaactggtgcatagatatgaaaaatgggccaggcttcagattgaatgggagcggatgcgggatgagacgatccgcaatctgaaatttccatttccatacagggaggggcagttcaatcttgccgcatctgtatatcgcacgatcgcaagaaagaaaaagctttttatccaggcaccgacggggacaggaaagacgatggcagttctctatcctgctgtcagggcaatgggagagggtctgggcgagaagatcttctatctgactgcaaggacgatcacaaggacggttgccgagcaggctttttttattttaaaggaaaaagggctgaagttccgttcagtgaccctgacagcgaaagaaaaaatttgtttttgtgaaaaagcagagtgtaatccacaggcctgcccctatgcaaaaggacattttgaccgggttaatgatgcggtctatgaccttttgaaaaatggcggtggaatgggaagaaaggagattgaggaacaggcacaaaagttccaggtctgtccttttgaatttgcattggagctttcggtctgggcagatgggattatctgtgattataattacgtatttgatccaaatgcacatctgaaaaggtttttcgcagacggaggaaataaccactatctgttcctggttgacgaagctcacaaccttgtggaacgtggacgtgagatgtacagtgcaagcctgtataaggaagatgttcttgaagtgaaaagaattgtaaagggaaaagataaaaagctgacgagaagtctggagagcatgaataaggcatttctggaactgaaaagagagtgtgaaaattatcagattctggacagcgtatctgtccttgcactgaaggcgatgaatcttctgaccgaaatggaacgttatttagaagaacagagagagcagggaaggcaggatggaacggaagaagagatacttccattgttctttggattacgaagttttctgaacatccatgatctgctggataaaaattatgtgatatacagcgaaatgcagtctgatggaagatttatggtaaagcttttctgtgttaacccggcagagaatcttcaaaaatgtctggaacagggcaacagtacgatctttttttccgcaacattgctgccgatacagtattataagtctctgttatcggtagttcaggatgattatgcagtctatgtagaatcgactttcccggaaacgaaccggagtgtacttctggcagaagggatcagtacaaagtacacgagccgtggagaagaaatgtatagcaggatcgcagaatatatagggaaaacgattgacagtaagacgggaaattatatggcttttttcccgtcttaccgcctgatggaggcagtgtatgaaaaattcctggagcttgggaagaaaagtgaagttttgcttcagtcgcagtatatggatgaggaagaacgggaagaatttctgaaaaaatttgaaaaagagcagggcgggacattggtagcattctgcgtgatgggcggtattttttcagaaggaatcgacctgacgcaggatcgtctgatcggagccatgatcgttggaacaggaatcccgcaggtatgcaacgaaagggagatcctgaagcagtattttggagcagagggatttgactatgcctatctctatcccggaatgaacaaagtacttcagtcagcggggcgtgtgatccgtacggaaaaagataaaggggtaattcttctgatggatgaaagattccaaagcccgcattataggagaatgtttccgcgagaatggtcggactgtagaagatgtacgatggaaaatgtgacagagctgctgacagaattttggaaaaaagatcccacctgatccggaaaatgtgtccgggaaaccgggcagaccggatgcaggaggggatgagacttattctttcaccggattcttcttccaatggattactcttccaccggatggaagcaactcagaaattcctgcgttgccttggaaagcgggagctgctcattgtatgcgatgaccagcgaacgctccggcatctcttcgttcatatccagggtgaagataccgtcagattctttggagatacagtaatcaggaataaatgcaattccgagtccgatgcgtgcaaggtcgatcagaagatcgttgcttgtcagctcaatctcaggaacaaggtctaactgatgctgctggaacaggcggtggagaaattcattggtggtactgttcttatccagcatgaggatcggataagcaagaaggtctgaaagagagatctttttttcttttaattcttcgtaattattccctgcgataaatacatcacggaaattcttgatcttcatggatgcggaaatattattcaggctggcattgggataattgaccacaatgagatctaccagcccgttcttgagcagttccgtacaatgcagagaagtctgattgatcactttgatatgtacattggggaacattttgtgaaacttttcaaggtatggtacaagaaagtatctgcaaattgtatcactcgcaccaatacggatctgacctccggtagaagctgcatcaagaagctgtgcctctcctttttggatcagattcatagccggttcaatatggcggagcaggatctcaccttccggggtaagctggacttttttggtgcttctgataaagagtgtctgatccagtttccgctccagtgtcttgatcgactggcttacagcagactgagaaataaaaagctgcttggacgcctctgaaaaattcagcgtagttgcaacatggtaaaataccttatatagttcataatttatatccatcatattattagacctcctaataagtaataatagtattataagataaatacataaagaatacaacaaaaaggagtaaatttgtgaaaaaacgggtcttatcttctgaaaaagtgaaaagcaaaataagtctgattttaagccggatcctgggactgatcctgacggtttcttttttagcggtgtggctggtcacgagtgtccgactcgtactttattcggatgttgatctgtaccgggcggaatatgaaaaatacggggtattagatgaattgaacatgacaatgggagatacaatttatgtaacccgtgagatgatggcatatttaaatggagagcgtgaagaactgaaagcagagactacggtggatggaatatggagagatttttttaatgagcaggatcggctgcatatgaaggatgtaaagcagatttttgactggagcaagagagtccggtttatggcaggagtgaccgcaagtttttcttttgtatttctgctgatctgcttcttctgtgaaaaaacaggtgctgaaaaaacaattttgtggaaggtcttatggaaagtgtaccggaatattgcggggctgattttactggcaggcgttgtggccggatttgtggtcagccggaactttgattactggtttacatggtttcatgaaaaagtttttacgaaccggctgtggatgtttgatgcagaaaaagactatatgatccgaatgttgccggagggctttttttcagatatggcaatgtggtccatgtggattttcggtgcaggtgcagttatcacaggaggatttttatgggtgaaaagcagaaaagaaacaatgagaagttccgtggaaactttccggatggataactgattagaaatgcttatgataaagtttaaatttattaattatacggatgtgcaattatatgatacgataagcataacaggttcattctaatttggtgtgaaggaataagcacataagaggaaaaggagattgtatatgagtaatgtaaagcgtgtgtatgtggaaaaaaagccggaatttgccgtaacagcgaaagggcttggacatgagatccgtcattatctcggaattaaagatgtgaccggggtacgggttctgatccggtatgacgcagaaaatatatcagatgagacatttgaaaaagcatgtggcggagtgtttgcagagcctccggtcgatatcctttacagagaaagttttacaaagaatgagacagatcggtgcttttcagttgaatttcttccgggacagtttgaccagagagcagattcagcagaacagtgtatcagatttatcaaagaagatgagacaccggtgatccgtacagcggtaacttatgtgatcgagggaaatatatcagaggaagagtttgaagcaatcaagaatcactgcatcaatccggtagattcaagagaagctgctgcagagaagccgaagacactggtaacggtatttgaagaaccggcagatgtaaaggtatttgacggatttaaagatatgccggaggcagaactgaaagagttgtatgattcacttggtcttgcgatgacgtttaaagatttccagcatatccagaagtattatcatggagaggaagaccggaatccgacgatgacagagatccgtgtactggatacttactggtcagatcactgccgtcatacgacattttctacagaattaaaagatgtaaaatttgatgacggagattacagagatgccatcgaggatacatataaagagtatctgaaagatcacagtgagatctttaaaggaagagaagataagtttgtatgcctgatggatctggcactgatggcaatgcgtcgtctaaaaaaagaaggaaagcttgcagatcaggaagagtccgatgagatcaatgcgtgcagtatcgttgtaccgatcaaggtagacggtgtcgaggaagaatggctgatcaattttaaaaatgagacgcacaaccatccgacagagattgagccgtttggtggagcagctacctgccttggcggtgcaatccgtgatccgctgtcaggacgtacttatgtatatcaggcgatgcgtgtgacgggagcggctgacccgacggtttcagcgaacgagacactgaaaggaaagcttccacagaaaaagctggtgcgtgaggctgcacatggatacagttcttacggaaaccagatcggtcttgcaaccggactggtaaaagagatttaccatccggattatgtcgcaaagcgtatggagatcggagcagtgcttggtgcagcaccgagacgtgcagtgatccgtgaaaattctgatccgggcgatatcattatcctgctgggtggtcgtaccggtcgtgacggatgcggaggagcaacaggttcttccaaggttcatacagtggagtccatcgagacatgcggagctgaagtgcagaagggaaatgcaccgacagagcgtaagatccagcgtctgttccgcagagaagaagtcagccatctgattaaaaagtgtaatgactttggtgccggaggagtttcagttgccatcggagaactggcagacggactgcgggtagagctggataaagtgccaaagaaatatgcaggactggacggaacagagatcgcgatttccgaatcccaggaaagaatggcagtcgttgtcgatccgaaagatgtagatgagtttatggcatatgcgaaagaggaaaatcttgaggcaacggttgtagcagtcgttacggaagatccgagactggttcttgtatggagaggaaaagagattgtaaacctttcccgtgcattccttgataccaacggggcacatcaggagacagacgtagaagtagagatgccgtccagaaaagacagcctttttatcaaaaaagaagtagaagatgtaaaagagacctggctgaatactctttctgatttaaatgtatgctctcagaagggtcttgtggaaatgtttgacggttccatcggagccggatcagtgttcatgcctcatggcggaaaatatcagatgacagagacgcaggcgatggtggcaaaagttccggtacagaatggtacaacggacagcgtatccatgatgagttatggatttgatccgtatctgtcaagctggagtccgtatcacggagcagtttatgcggtgacagaatcagttgcaaagatcgtggcagccggtggagattatagtaagatccgttttacattccaggagtatttccgcagaatgaccgaagatccgaagagatggagccagccttttgctgcattgctcggagcgtatgcggcacagatcggatttggccttccgtcaatcggaggtaaggacagtatgtccggtacattccaggatattgatgttcctccgacactggtatcttttgcggtcgatatggcactggagcaggatatcatcacaccggaactgaaaaaagcgggaaataagcttgtatggcttaagattgagagagatgaaaatgatcttccggtttatgagaaagtgatggagcagtatggaaagatccatgaagatattcagaaaggaagaatcgtttccgcttatgcacttgatcgtcatggaattgccagtgctgtaagtaagatggcatttggtaacagactgggagttcagcttgagacaacggtggataaaaaggatctgttcgcaccggcatttggtgatctcattgcagaggtacctgcgggagaagtggagaaccttgtggctgactatacagagatcggagcagtaactgaggaagcagtgctggcatatggggatgtaacgatcagtctgaaagaggcagaacaggcatggacaggtactcttgaaaaagtatttgcaacaaagtctgcagcagattctgataaaaaagtagaagaaaagttgtttaatacagcagatatccatatctgcagccataagatcggacaaccgactgtctttattcctgttttcccgggaacgaactgtgagtacgacagtaaacgtgcatttgagcgggcaggagcaaaggtgattacgaaagtattccgtaatctggacgcagaggatatcagaggatctgttggtgaatttgaaaaagccatcggacaggcacagatgatcatgttcccgggtggattcagtgcaggagatgaaccggatggttctgccaaattctttgcaacagcattccagaatgcaaagattaaagaagcggtagagaaattgttgaatgaaagagacggactggcactgggaatctgcaatggattccaggcactgatcaagctgggacttgtaccatatggtaagattacgggtcagacagaagattcaccgactctgacatacaataccatcggacgtcatatttcaaagatggtttatacgaaggttgtaaccaataagtccccatggctgcagggagcagagcttggcggagtctatacgaatccggcttcccatggagaaggaagattcgttgcaagtgaggaatggctggaccggcttttcgctaacggccaggttgcaacacagtactgtgatcctgaaggtaagatcagtatgaatgaagagtggaatgtcaatggttcctatcgtgcgattgaaggtatcacaagcccggacggacgtgtacttggtaagatggctcattcagaacgtcgtggggatcatgttgcgatcaatatttatggagaacaggatctgaagatttttgaatcaggtgtaaaatattttaaataataattgcggtaaaatattgcagattgtagaaaagttcagcgattgctggacttttctgcttttagaaccgtctttctgtaaattctgcagttgaggatcgtaaaagtcaggcaaggatggaaaaagtcggagacgataattaaaaaaattgaaaaaagtgttgacatttgcgatgagatgatagtataataagaaagtcggttgcgggaaagagtaatcagaaccgcaagagatacaggtatatggggtcttagctcagctgggagagcatctgccttacaagcagagggtcacaggttcgagccctgtaggccccataccaatttaatatggcgggatagctcagttggctagagcacacggttcatacccgtggtgtcgctggttcaaatccagttcccgctactatatggggtcttagctcagctgggagagcatctgccttacaagcagagggtcacaggttcgagccctgtaggccccatatcaatttaatatggcgggatagctcagttggctagagcacacggttcatacccgtggtgtcgctggttcaaatccagttcccgctacttggtctgagaagctctgaggggcttcttttttgttgcctcctgataagctgcatccgttccgaatgatcactgttgtatttgcgataccggatggtgtatacttgaaaagatgagagaatcaggaggaacaatattttgtacgaaagaaagtatcataagcacatctccgcaagacataactggtttgacctgaagttgaacgaagtatggcagtatcgggatctgatctttttatttacgcagaagaattttacggtaagttataagcagacgatcttaggtccgttatggctttttatcaatccattgttgaccagtgttatgtatatggttgtatttggaaatattgcgaaacttggaacggacgggattccgcagcttttattttatctgagcggaaatgcattatggagttattttgcctcctgtctgaatggaaatgcggcaacgtttacatcgaatgcacgtttgttcggaaaagtgtattttccgagactgactgttccgatttccaatgttctctgtagtgtgatccggtttggaattcaaatgctgctggtagtgattctgctcggatattatatatggaaaggggctgtcagtcctcactgggaagcacttcttctgatttttttacttttactatggcttggctgcatggggatgggagtcgggattctgatctccagtgtgacgacaaaatacagagatctttcagtactggtgggctttggaatgtcactatggatgtatggcacaccggtggtttatccaatgagcattttacctgaaggaatcctgaaaaaaataatcttattaaacccggtcactgctccgatgggaatgttccgctatattttactgggggaaggaagtattcttccggtgagtatcggagtttcacttctttttacaatactggtaatgctgggaggaatagtcgtatttaataaagtggaaagaacatttatggatacagtgtaaaggaggacggaatggaaaaggaaaatctggcgatccgaatttcaggggtgaaaaaggagtatcgtcttgggagtatcgggggaagaactttgcaggcagatcttcagtcctggtttgcaagaaaacggggcagagaagatccaaatgtaaaaatcgggcaggatgaacggctggtcggacaaaaatttatggcattgaacgggattgatcttacgatctgtcagggtgaaatgtgtgggatcattggaagtaacggtgcaggaaaatcgaccctgctgaaactgctggcacaggtgacggcaccgacagaaggagagattgacctctatggaagagtgacttccatgctggaagtcggaaccggttttaatggagagatgaccggaagagaaaatatttacatgaacggaacgattcttggaatgtcaaaagcggagatcagaagcaaaatggaacagatcattgagttttcggaggtaagggagttcattgatacaccggtcaagcgatattcttccggtatgtttgtaaagctggctttttctgtggcagcacatcttgacagcgagatcatgatcatggatgaagtgctggcggtcggtgatatggcatttcagaaaaagtgtctggataagatgcgggaagttgcacaaaaggagaacagaacggttttatatgtaagccataatatgaatacgatccggagactgtgcgacagatgtattgtgctggatcagggaaaagtgatctatgacggcgaagtagagggtgccatcgcagtgtatatggatcatgcagttggagaaaatgagactgacatggatctggcagaaaagcagcgtgccgcccgcattctgaaccttcagcggaatcagggactctttatggagcatctgaccatgaagggaaagatcactccggtttttgcaagggaagaaacactggatttgaggatcagagtcaggaccacgcagcctttgaaaaatgtcatgttccgtctgacgctgcgtacggacagtgattcgggattgggaacattctggtcaaagccggtagattttcctgcgacaggagagcaggatatggaaatgagcatgccattacagctctttgagaagggaatcttttatgccagcattgggttttatcagaagacagcgggcggagaaccacggatactggatcatattaccagagcatttaagattgaaatcccgggcagtgcaggatggagtaccaatgcatacgggtatctgcggttcccggaaatgaagatacaaaaagtgaagaacacaagaaaaaaggagaccaattatgaataaaaaaggtggaaatgtgatcagaatcgtattaggagtatatctgatctatcttggagtgaatatttttattgaagttgttcagaagaatccggctaattcaggatttatgggagtagccggcggtatatttgtcattgtcggagcggtctatgcatttcttgcggcaaaaaaagtgtttgctgagatgaaaaaagagaagaatgtcgaagaagagctttcagtttcagaagcggatggaaatgaaataaaatggcaggaggcagaaatatcccatgcgaagaaagaatcaaaaggaccagtcatggtagaggcaggaccggacaggaatgaaagaaaagaggcagaaaaagagaacaaggtgaacaccggagaaaaaatagcagataaggaaagggcagataaggaaaaagtgacggctgaaaaaaaggcagataaagaaaaggcggagaccgaggcaaaagccggtaaaggagaaaatccggcagaaagggacaaggtgaaataaaatgcgggtaggcatgggatatgatgttcataaactgacagaagaccggaaactgattcttggcggagttgagatcccttatgaaaagggacttttaggacattctgatgcagatgttctgctgcatgcgatcatggatgcactgctgggagcagcggcactgggagatatcggaaagcatttcccagatatagatccgcagtataaaggcatttcaagtatcaaattactggaacatgtagcagcattactggatgaaaatggatatgtggttgaaaatattgatgcgacgatcattgcccagcgtccgaaaatgcgtccatatattgatcagatgcgggaaaatattgcaaaggcacttggcgtggaaaccgatcagatcaatgtcaaggcaacgacagaagagggcctgggctttaccggaacaggtgaggggatttcttctcaggcaatctgtgcaatcgagaaatataccaattatagcagtatagatgttgcagcaccggctgcggggtgtggaggctgttgtgcaatgaacaatcagtgagatcagaaagacgaggaaaagaggatggaaatccgtaaactggaatctgcagaacatggaaagacccgatttttgtgggaaaagattttcaaggaagacagtcagacatttgtagattattattattttatcaggacaaaagagaatgtgatctatgtagttgaagaaaacggagcaatccgttccatgctgcaaaagaatccatactggatgaaactggaagattcggtttttgattcggaatatattgtcggagtcgcaacggaaaaggagtaccggagcagagggtatatgcggcagcttctgatcgcggcactggaagaggaaaataagaaaaagcatccttttacttttcttatgccggcagcagaagcaatttacagcccgtatgattttcgatatatatatcatcagaaacagatggaactggactctgacgttttctttgccttaaaaagagataaaaaaaccggcgaaaaagaaagcagagacaggggaagacaggaaagagttacacgggatgccgaactgggagatgcagaaaggatcgctgcgttttttgaaaaaaatgaatccccgaaatgggcagtctgcacagtgagggacagcgtatattatcagaccaaaattctggaacagcagagcgaatccggtggagtacggctgatctttgaagaaaaagatttagtcggtgtcttcttttatgcaagagaggacattcttgagatccttgaaccggttatcctgcaggaaaaagaggatgcattcctggaggcggtggaagaactgcgaagagaaaaggaactggtgaagatcctgggatgtacggagaaaatgcgggaattgtgggaaaatgtccatggcgtgaggacggaagagaagcctctcatcatggcgcggattacgcatctgccgactttcctgtctgcgatgaaagttcctgaggaagagaaagtagactgctcctttgcggtgatcgatcctttgcttcagaagaacagtggtgtatggagaatgaaaagtgactggggagaagataaactttgtgtgagtgagacggaagattccgagggagtttttccgatcgatgcactgacccagcttttatttggaactgtaccgatcagagagatcgcagagcggacggatgtaatggcaacagagcggctggtggcagaactggagaaaatctgtaaactgaaccgggttttcttaaatgagattgtataatgcggttgacaaaaactgaaaagttgaataagataatgtaagtgagtaggattgtgggagtgcgtagcacggagcaatccgtaggcatcaaagtcgggagcttttgccccgacatcatgtaagtgagtaagaaaaagaccaggaacgggaagagtagctatgttcaggctgccagagagtgggtgtcatcggctggaagcatccttaagttatgaagattgtgaagtgcccccgggagttgatcctgcgaaagagtaagtagcgggatacgttgacacgcgttaagtgtattaagtgaaagaagaggattcttttattagagtggaaccgcggagaagacttcgtctctattttgagacggagtctttgttgttcttaaacttttgaatagggtgttaggagagaggaaaatgagcatattatcgtatgtgaaagatgaaattcaggttatacgggagcgtgatcctgcgatcaaatcgaatatggaagtatttctttatccgagttttaaagtcatattgaattatcggatcgcacataagctgtatctgaaaaagcatttcttttgggcaagatggatctcccagagggctgcacgaaagaccgggattgaaatccatccgggagccacaataggaaaagggctttttattgaccatggaagtggtgtgatcattggagaaacgacgatcattggagataatgtgactttgtatcagggcgtaacacttgggggtacaggaaaagaacagggaaagagacatcctactttaaaagataatgttatggtcagtgcaggggcaaaagtaatcggttcttttacgatcggggaaaattccaagatcggggcaggatccgttgtgcttgaagaagttcctccgaactgtaccgtggtcggtgtgccgggcagaattgtaaagatggataataagaaagttccgcgaagcgatatggatcagatccatctgccggatccggtactgaatgatatccgtgaactccaacaggaaaatattcaacttcacaagcagttggaggatatggtagaatatatgaaatgcttagagaagaaaagaaaggaagacgcagcaaatgaagatttataatacgatgtcaaagagaaaagaagaatttgtgccgttggaagaaggaaaagtaaaaatgtatgtatgcggtcctacggtttacaattttattcatataggaaatgcaagaccgatgatcgtatttgatacagtaagaagatattttgaatataaaaattatgatgtgaattttgtatcaaatttcacagatgtagatgataagatcattaaaaaggcaaatgaagaaggcgttactgcggaagaaatctccaaaagatatattgaagagtgtaagaaagatatggaaggaatgaatatccagccggcaacgaagaatcctcttgcaacagaagaaattggcggaatgatcagcatgatcgagactctgattgaaaaaggttatgcctatgaaaagaacggaactgtttactaccgaacaagaaagtttgcagaatacggcaagctgtcccataaaaatctggatgatctgcagtccggtggacgtgcattgcttgtaagcggtgaagatgaaaaggaagattcactggattttgtattatggaaaccaaagaaagagggcgagccggcatggaaatctccatggggagagggtcgtccgggatggcatatcgaatgctcagagatgtctaaaaaatatctgggcgagcagattgatattcatgccggtggagaagatctgatctttcctcatcatgagaatgagattgcacagagtgaagctgcaaatggaaaagagtttgcaaaatactggatgcataatggattcctgaacatcgacaaccgcaagatgtccaaatctcttggaaatttctttaccgtaagagaaatttctgaaaaatatgatctacaggttctgagattttttatgctcagtgcacattatagaagtcctctgaacttcagtgcagaactgatggaagctgctaaaaatgggctggagaggattacaacagcagcagagaacctgaaattcctcatcaataatgcaagaacggaagatatgagtgaggatgagagaaaaaaacttgccggatcgatagcatatgtcgagaactttgagaaagcaatggatgatgattttaatacagcggatgcgatttcagcagtatttgaacttgtaaaatatatgaatacgacaactgacggagcaagttccaaagaatatctgcagaatctgtttgactgtcttataagactgacggatgttctgggaattattgtggataaggaagatgagatccttgcatctgatattgaagcactgatcgaagaacgtcaggcagcaagaaaagctaagaacttcgcaagagcagatgagatcagggatgaacttctggcaaagggaatcatcttaaaagatacaagagaaggagtacaatggaaaaaagcgtaggtacaggattggaaccatttatcaggaaaattccggggatgaagcagattgacccgaagcagtgttcaccactggttctggcatatgtaggggactgtgtctttgatctgatcgtaaagacgatggtcgtcggaagaggaaaccggccggtccatcgtcttcatgaggagacaagccggtatgtccaggcatcggcacagtcctatatgatgcggttcatgcaggaacatctgaatgaggaggaacacgcagtctaccggagggggcggaatgcaagaagtgtatcaccggcgaaaaaccagtcgatcacggactacagaagagcaaccggctttgaggctctgatcggacatctttatctgagtggagaatacgaaagactgacagaactggtgacgatcggactggaggctatggaagaaaaatttgatacagaaagaaatgaaggagcaaagaatgcgggaaaataagagatatcatgaagcagagaaccatacgggacaggataattcccatacgctggttattgaaggcagaaatgcagtactggaagcattccggtcaggaaaaccgatcgacaaagtatttgtactggatgggtgtcaggacggtcctgtgcgaacgattgtaagagaagcaaaaaagcatgatgccctgttgaattttgtgacaaaagagagactgtcgcagatttctgagaccggaaagcatcagggagtggtagcctatgcagcagcgtatgaatattcaacggttgatgatatgtttgcacttgcagaggaacggggagaagatccctttatcctgatccttgataatatcgaagatccgcataatcttggagcaattatcagaacagcgaatcttgcaggagcacatggagtaatcattccaaaaagacgggcagtcgggctgacggcaactgttgcaaagacttctgcaggagcattgaattatactccggttgccaaagtgacgaatctggttaagacgatggaagaactgaaagaaaaagggctttggtttgtctgtgcggatatggacggtgagccgatgtatcatctgaacctgacaggaccgatcggactggtgatcggaaatgaaggggagggagtcagcagactggtaaaagaaaactgtgattttgtagcaggaatcccgatgaaaggtcagatcaattcgttgaacgcatcggtggcagcaggagttcttgcatatgagatcgtaaggcagagaatcataaaagggcagtagacgcaggagcatttgagtaagaaccgatggaaaaatatgataaagtgacggatgagcagcttatcagggatttccgtaatggagaccgggaaattatggatcatctgatgatgaagtataaagcaatggtaagaaaaaaagccagggcgatgtatttgtttggcggggagaacgaagatctgatccaggaagggatgatcggactgatcaaagctgtccgggattatgacccggatcagggagcttcttttgcgagttttgcggaactttgtgtgtcaagacagatgtattccgcaatcgaggcatcaaaaagaaaaaagcacataccgttaaattcatatgtatcgctgtatgatgacagtggtcaggaaggagaggaaagaagaacccctctgatcgataccattgagccggttcgtgataatgacccggaagtgctgtatttggggaagaaatttacggaagtttttattgaacagttgaaagatactttgagtcctttggagaaccatgtgctgtatctgcatttaatgggaacggattataagacgatcgcagagcttctgggcaaaagtccgaagtcaattgataatgccctgcaaaggatcaaagcaaaggcagaaaagatgcttgacaaatcagaataagctctttcagaggagatacaaatgaataaagggaaaaattgtttttttgcaatactcgtatttggattaacgatggcagtatttaatggaatgtcggtcgtattggctgtatctgcgtccatcggtggaggaatcattcagggagcaaatggagtgaatatgacctacgattatctgatggatcatatgaatttctattctgtactggtttatctgattccgctggctatttttggactttggtattatttcgcatttgtggatcagaaaggtacagaaaattccctgtccgtgaaaataaaaaagttagatataacagggtgtctgatcctcgtgatttttacattttcaatccagcatgtgacgagtctggtgatggcagtaatcaaccagttatttccacaggcaatggaaacttatacggaaatgattgatagttcgggaattacggagtattcgctgatgtgggtagtcagcacgctgattctccctccgctggtggaagaaatgatcttccgtggactgattatgggatatctgaggagaaccggaatgcactggatgatcgccaatgtgatccaggcagtctgcttcggcatttttcatcaaaatttagttcagggaatctatgcagggcttctcggactggcacttggatatgtagcgtatcgttatggaacactatttgcatctatgctgatgcatctgctctataatcttttcggaactgtactgattgatattgaatcaagtattatgccggactggatgctggggcttctgattttcctctgtgtgccgcttacagttgtgggaattgtgcttgtatatatcaagacagtaaatacagataaaaagcaggagagcaagatatgagatttgtaatacagagagtcacagaggctgctgtccgggtggatggtgaacttcttggacagatagagaaaggatacctggttctgattggtgtggcagaatcagatacggaggaaatcgcagataagatggtaaagaagatgaccggtctgcggatttttgaagatgagcagggaaagacgaatcttgcgttgaaagatgtgggaggcagtctgcttcttgtgtcgcagtttacactatatgcaaactgtaaaaaaggaaatcgtccaagttttatcgaggcaggttctccggaaaaagcgaatgccctgtatgaatatattattaaaaaatgcagagaaagtgtggaacgggtagaaaccggccggtttggtgcggatatgaaagtgagtctgctgaatgacggaccgtttacgattgtccttgattcggaaaaattataagatgtaagaaaatgattataacaattataagagattttcttgacttttctttcagagtagtgtatatttatgattgcgttcggttttggacgcaatgtgctgtcttggcgcagtcggtagcgcgtcgccttggtaaggcggaggtcgggggttcaagtcccctagacagctttgaacttaatccccggaagtgcctgaaaatgcggtgtttccggggatttttcttgctcaaaatcacaatccgtaggaaatccgtaggttactttgcaagaagctgaatctcttttatcttactattttcctgctcttgctttttcttcgtgatgtgtaggtagatttcttttgtgattttgctgtcagcgtgaccgagcctgcgtgagattgtatccacatcaacttcctgttccagtagcagagatgcgtggttgtgaatactgtcataatcagaattatggagtatagcgtatgtaaagtaaaaggcaatggatcagaaatggttcattgccctttatgcaggcttctatagccgtaatcctttaatatctttaatacgtgataagattgtattgcagctgcagctgataacgccgggaagtgtatcaataactgtgtgcaggaagtgttccatttcatcacttgatgaagcaacggcatgtacatgcagcttgtctcttcctgtgacacggtaaatctgcgtgacggtatcattattatataatatatctgtcacctgcgacagatggtctggttttgtctcgatttcaaaatagcatgaaacagcaccactgatcttttgagggtttattatagttgtatattcttcaattataccttttttctccagagcctgaatccgggcttttactgccactctggaaataccggtttctttaccgatatcagagtaggaaatacgtgcattttctataagcaactggatgatcttctgatccagttcatctaaaccgttcaggtacataagtgtccctcctgtaaaataatatcctccggatagtaaattttcttaaatatcatatcatttatgttgctgaaagtaaactctggcttgcttgagtttccgcagttttatccacagacctctgatttttctccattcattataaacaactttatgaaaatgcccaaaatataaggaatctaacttctttttgatgtaaaattaagctaccaaacaaaaaccttactaaacaaaaaagaaggagattccctatggctaattttacatcaaatacttacactttgaaacgaaaaattttaactttttcaaataaaattt

SEQ ID NO: 35 - DNA, 158843 bp, Mediterraneibacter lactaris
cgcttcttttatgtgcgggcggaggaatgctgggaggaatggtttcctgatggaggaatgattttgcaaaagctaaattgaaaatgttcctgattctgtaaaagcggaaaaaagtctttaaaaaagcaccgccttatgctataatagcaaaagcaatatgttcgatagaggaggaatagaaatgaagcatattaagacgctgaatactcagacactgaatcatacagtaaaaaaaggcggatgcggtgagtgccagacatcctgtcagtcagcatgcaagacatcctgtacagtaggaaaccagacttgcgagaacagaaaataatgcggcaatgacccggaatcttgaagggagggcagcgatgagagtcgctgccttatgcttgtcttatgggaaagttataaaatacagaaagtgaggtattggtgtgatacatcagtatcagaataatggatataatatcgttcttgatgtgaacagtggtgcagttcatgtagtggatcaggaagcttatgatgtgattgcagtcctgaatgaaatgaacgcagagcatacaccggagacgctgaaggcaccggagacggaaacggtgttgaaagaaaagctcggggacagatatacggaggaagacctgaaggatattctggaggcggtaacagagctgacagagcagggaagactctttacaaaggatatttatgaaaatttaatcggtattgtcaagcagagaaaaaccgtagtcaaggcgttatgtctgcatatcgcacatgactgcaatcttgcctgtcagtactgctttgcagaagaaggagagtaccacggaagacgtgctttgatgtcctatgaagtgggaaagaaagcactggatttcctggtggcaaattcaggaagcagaagaaatcttgaagtagatttctttggcggtgaacctctgatgaactggaaggttgtcaaggaactggttgcttatggaagagagctggagaagcagtatgataagcatttccgttttacactgacaaccaatggtgtacttctgaatgaggaagtacaggagttcgtgaaccgtgagatggataatgtagtgctgagtcttgacggacgaaaggaagtcaatgaccggatgcgtccgttcagaaatggaaagggaagttatgatctgatcgttccgaagttccagaaactggcagagagccggaatcagcagaaatattatatacgtggtacatttacaagaaataatcttgatttttcaaaagatgtggagcattttgcagatcttggatttgagcaggtatcgattgagccggttgtcggggaagatacagatccatatgcaatccagaaagaagatcttccacagatctttgaagaatatgacagactggcaaagatgatcatcgacagggaaaagagcggaagaggattcaatttcttccactttatgatcgacctcgaaggaggcccgtgtgtgtcgaagcgtctttccggatgtggatccggaaccgaatacctggctgtgacaccgtggggagatctgtatccgtgtcatcagtttgtaggtcaggaagagttcctcatgggaaatgtcgatgagggcattgtaaaaccggagattgcggaagaatttcgcggatgcagcgtttactcgaaagagagctgtaagacctgctttgcaaggttttactgcagtggcggctgtatggcaaattcttacaagttccaccataccatcaatgatacatatgaagtgagctgcgagatggaaagaaagcgtgtggaatgtgcgatcatgataaaagctgcgttggcagacaagtaagaaaggaaaatgagagatgaaaaaaggtaaaagttttctcagcctgttcctcgtcattgccgtaacggttctctttggagtatcctgtatgtatggtgttgacctgaaaggaacaggagctgcgaagaacatcaatctcggccttgatcttgaaggtggtgtaagtatcacttatcaggttaagggagacaatccgtcccagaaggacatggatgatactgtatacaagctgcagaagcgtgtagaacagtacagtacagaggctcaggcttatcaggtaggagataaccgtatcagtattgagatccctggagtaaatgatgcaaatgcgatcctggaagaactgggacagccgggttcactttactttatcaagcataaggacagtgccggtgaagagaactatacgcttggttcttcaggttatgtgctgaataagacaatcgacgaactcaaagaaagcgactcaatcgtactgaccggatcagaagtaaagactgcttctgccggacagatctctgattccacgactggaagtaaagagtacggtgtggatctggaactgacaacagaaggtgctgaaaagttcaaagaggcaacccaggaagctgttaataacagcaatgatacgattgcaatctattatgatggcgaactgatcagtgtgccgaaagttaatacggtaattgagaatggtaaagcacagatcacgggttctatgacttatgaagaggcagataatattgcgtctacgatccgtatcggtggtctgaatgtagaactggaagagttaagttcagaagtagtaggagcacagcttggtcaggaagcagtaagcacaagcctgatcgccggtgcgattggtcttgcactggtatgtattttcatgtgctgggtatatcttcttccgggacttgcagccagtatggcactgctgctttatacagagatcacactgcttttcctgaatgcatttgatattacactgacattgcctggtattgccggtatcatccttggtattggtatggcggtggatgcgaacgtaattattttcgcacgtgtgaaagaagaacttacagccggcaagtctgttcatgcagcattgaaatccggtttccataaagcaatgtcagccatcatcgacggaaatgtgacaacgctgatcgcagcaggtgtgctgtggcttcgtggaagtggatctgtcaagggatttgcacagacgctggcacttggtatcgtaatctccatgtttacagcactggtgatcacgagactgatcattttctctttctatggagctggtatccataatgtaaaagcttacggaagacatctgaaagaacgtaaaccatttgatttccttggaaagaagaagatcttctttgttctgtcgatcatcctctgcctgtgcggaccggtcatgatgggcgtgaaccatgcaagaggaatcggggcaatgaactacagccttgactttgtcggaggaacatccacgaatgttacatttgataaagaatatactcttgatgagattgataaaaatatgatcccgagtatggaagagatcaccggagataagaatattcaggttcagacggtaaagggaacgaaccaggttgtatttaagacgcagacgctggatctgacaaagagagaggctctcgcatcttatctgaatgagaattatggtgttgagacaaaagatattgcaactgaaaatatcagttccacagtaagttctgagatgcgtgtggatgcagtcattgctgtgatcattgctacgatctgtatgctgctttatatctggttccgtttcaaggatatccggtttgcgacaagtgctgttattgcactggtacatgacgtactggtagttcttggattctatgtgatcgcaagagtatctgtcggaaatacatttattgcggttatgcttacaatcgtaggatattctatcaatggtacgatcgttatctttgaccgtatcagagaagagctgaagacgaagtccaaggcagaagatctgaaggatcttgtaaaccgttgcattacgcagacactgacaagaacaatctataccaatattacgacatttatcatggttgttgtactttatatccttggtgtcagctccatcaaagaatttgcagcacctctgatggtaggtatcgtatgtggtgcttatacatctgtatgcattaccggtgcactctggtatgtaatgaagacgaagatcggtgcaaaggctgccacagtttctaacggaacaaaagccattgctgatacaaagaaggctgaacaggcagatagttccgaagctccggctgatggaaatactgcaaagagcggcaagaaaaaagggaagaaaaaatcctttaaagataagaaaaagaaaaataaataagcattgaagtttcagcctgctttatggcagacattcacaggaagcctgttccggcagtaaagtcggacgggcttctgttcgtttaagtggagaacaggagaaaatgacagatggcaaagtggtttatcaatatgaaaaaagcagatttcaacggaattgccaggaaatatggagtttccccggtaatcgcaaggatcatgagaaaccgggaagtcaggacagatgaggaaattaatctgtatctgaatggcacaccaggagatctttatgatggccggatgatgaaagatatggaatgtgcagtttcaattttgaaagagaagattgcggaagggaaaaaaatccgcatcataggagattatgatattgacggagtgaattctacttatattttgcagaaaggactggaactggcgggggcggatgtggatacagatattccgcacaggatcaaagatggctatggtctgaaccgtgcattagttgaccgtgcataccgggatggggttgatacgatcctcacctgtgataacgggatcgcggcaattgaggagattgcatatggaaaagaaaaagggatgacggtgatcgtgacggatcatcatgaggtgaaatttaaagaagaaaatggtgttcgcatttatcaggtccccgcagcagatgcggtaatcgatccacatcagaaagactgtaattatccatataaagagctttgcggagcaggggttgcctataaactggtgcaggtattgctggaggaactggagatggatccggcaaaagcagaatatctgatcgagaatgtcgcgatcgctacgatcggtgatgtggtaaatctgacaggagagaacagaatttttgtcagaacgggcctggaaatgctgaaaaagacgaaaaatgaagggttgaaggcattgtttgaatgtactggaatcgatgtggaaaatctgaatacctatcatattggttttgtcatcggtccatgtatcaatgcctgtgggagacttgatacggcaaaaagagcattggaactgctcaatgcaccgggacgcagagaagcagtgatgatggcagaagatctgaaagcactcaatgaaagccggaaggaaatgacagaaaatggtgtggaacgggcagttgaaatgattgaaacttctgatctgaaaaaagacagtgttctggttgtctatctgccggactgccatgaaagtattgccgggatcattgcaggaagactgaaagaacgttattatcgtccgactttcgtattgacaaagacagaaaatggagcaaaaggatcaggacgttccattgaagcatatgatatgtttgcagagatgaaccggtgtgcggaactgttcacccggttcggcggacataaactggcagccggtctttctctgcctgaggaaaagattggattattcagaaagaagatcaatgaactggcacaactgacagaggaggatatgcaggagcgggtatcgattgatttatgccttccgtttgaatatattgatgagaacctgatcgcagaactgaaaagattagagccttttggcatgggaaatgaaaaacctaaatttgcggaaagaaatctcagtgtgatcgatccgaggatctttggaaagaaccggaatgtattaaagtgcaggctgagaaatgaacgaggcatgcagatggatgggatttatttcggagatgtagaagactgcctgaaagtgatggaacaaagaaaagtaatgcctctgactttttacccgaagatcaacgaatatatgggaaaaagaagtattcagcttgaaattgtaaattatcagtaatgaaagagtgaattatcggaatttcacgtgcaatatgctcaaattgcacaacagttggaagttgttgtttgaaaatggggaaaatggtgttatacttaatgatattaagttgaaatgtacccaaaagcagataatctggtgtacagattcagatacaaaggatgagtgaaaggggaagtcgatatggcaggcactctggagtatgaagagctgaataaaaatcttgaaatggtggatggacatgcggtgaaagcaccggaagattaccaggatccggaacagttgtatcaggcactgatcgcccgggtgcgtaagtatcatccgtcagcggatatcacaatgatcgaaaaggcataccgtatcggaaaagaagctcataaagatcaggtacgcaagtcaggagagccttatattatccatcctttgtgggttgggatcattcttgctgaactggagatggataaagagacgatcgttgccggtatgctgcatgacgtagtggaagatacggagatgacgctggatgatattacgcgtgagtttggggaagaggtcgcattgctcgtggacggagtcacgaagttagggcagttgagttattcgcaggataaactggaagtacaggcagagaacttaagaaagatgttcctggcgatggcaaaggatatccgtgtgattatcatcaagctggcagaccgccttcataatatgcggactctggaatttatgaccgaggcgaagcagaaagaaaaggcccgtgagacgatggatatctatgcaccgatcgcacagagactcggtatttccaagatcaagacggagctggatgatctttctttaaaatattatcagccggaagtatactatcaactggtaaaggatctgaatgcccgcaagacagagcgtgaagaatttgtgcagcagattgttgcggaagtttcaaagcatatggagaatgcatcgatcaaagccaaagtttatggaagagtgaagcatttcttcagcatttataagaagatggtgaaccagaataagacgttggatcaggtgtatgatctgttcgctgtgcggatcattgtggactcagtgaaggaatgttatgccgcactgggagtgatccatgagatgtatactccgattccgggaagattcaaggactatatcgccatgccaaaggcaaatatgtaccagtctcttcatacgacactgatgggaccggcaggacagccgtttgaaatccagatccggacagaggagatgcataagacagcagaatatggtattgcggcacactggaaatacaaagaaaccggaggaagtaatgccaagagcctgaattcccaggaagagaagctgaactggctgcgtcagatcctggagtggcagagagatatgtcggataaccgggagttcttaagtctgctgaagggtgacctggatctctttcaggaggatgtctactgctttacaccaaacggagatgtcaagaatctgccgaatggttccacaccggtggattttgcttatgcgatccacagtgctgtcggtaataaaatgatcggtgcgagagtgaatggacggcttgtaaatattgattataagatccagaacggtgacaggatcgaaattctgacgtcccagaattccaaaggaccaagcagagactggctgaatattgtaaaaagtacgcaggcgaagaataagatcaaccagtggtttaaaagagaatttaaagaagataatattatccgtggaaaagaactgatcggcaattactgccgcagcaaatccatagatcttgtcaatatactgaaacccaaatatgagcagatcgttcagcggaaatatggattccgtgactgggatgctgtgcttgctgcaatcgggcatggaggactgaaggaaggtcaggttgtaaaccgtctgctggaagaatatgaaaaggatcataaaaaagagatcacggatgaaaatatcctggagaagatttctgaggcaaataagcagaaagtgcatattgccagatccaagagcggaatcgttgtcaaggggatcaatgatatggcagtgcgtttttccaagtgctgcaatccggttccgggagatgagatcgtcggttttgttacgagaggaagaggtatgtctatccacaggacggactgcgtcaatgtgatcaatctgtctgcagcagagagatcccgtctgattactgcagaatgggaagatccgggtgatacggaagagggaggacagtaccttgcggagctgaagctttatgcggacgacagaagaggacttcttctggatatcacaaaagtatttacggaagaaaagatagatgtaaaatcgatgaatacaagaacgagtaaaaaaggaacagcaacgatggatatgggctttatcgtccatggacgtgaggagctgaaccgggtaattaaaaagttaaggcagattgaaaatgtcattgatatagaaagaacgacaggctgatcaggagatcagataacctgggcggatcaaaggggaaaatatgaaaattgagagatttgtacttggatcgattgaaaccaactgttatgtcgtagtaaatgaggatacaaaggagtgctttgcagttgatatggcatattgtcctcaggagtatgtggaccatatcagggagcagggatatcagatgaaggcactgttcctgacccatggacattttgaccatattatgggaatcgaagatttcctgaaagcgtttgatgttccggtttatgtcggcagagaggagcagccgttactggcagatgacagactgaatgcttcatctatgtacggatatcattgtgcatatacaggagcaaaagcattggaagacggacagacagttgaatgtgcaggaacagaaattcacgtgattcatacaccgggacatacagtaggtggatgctgctattatcttccggaagaggaagcactgttctgtggagatactttgttctgtggttcgatcggaaggacagatcttcctacaggaagcagccgggatctggcacattctatcagagaaaaactgatgatcctgccggatgagacaaagctgtatccggggcatatggatgagtctacgattggctatgaaaaggagattaatccttttatctaaaagaaataacggaacaggaaaagaatgatagagataaaaaataagaaaaataaatttacctataatgtatatcatgtcacgaaagctttttttcctgaggaggagatcgtgcagactgttgatgaagagcaagagccgctggtatggatgcagttaccgggaggagcttgcttttcccttgcagagagaagtctgacggggacagacagaaaaatgactcctgaggaagaacagacagaaaagagggaggtgacccgggaggtttaccgctttctttcaaagaaatgcgacagggaactggcgtgggggatgcttacgggagtcagaccgacgaaacttgtgatgcagaaactggaagccggactggatcaggtacagatcaggaagttcctggaggaagaatactgtgttacgaaagaaaaggcagaacttgcttatgagattgcgtgcagggaaaaggagcagcttggaaagctgaatgccagcgaaggattcagcctttatgtcgggattccgttttgtccgagtatctgttcctactgttctttcagttcttctccggtcggcgagtggaaagataagatagatgcctatctggatgcactgatcaaggaactgaaagcacttggcaggatggcgggagagcggaaaccggatacagtgtatgtcggtggaggaactccgacgacactggaggcgggacagttagatcgccttctcggaacaatccggaactgttttgatctgtctgaactgaaagagtttacagtggaggcaggcagaccggacagcattacgagagaaaagctggaagtgatccgcagatatccggtgacgagaatttctgtcaatccacagacgatgcagcagaagacactggatctggtcggaagaaagcataccgttgaagatgtagaacgcatttttcacatggcacgagagcttggatttgataacatcaatatggatctgatcgcaggacttccgggtgagacaagggcggatatgcaggatacattgagaagaatcaaagcactcgcccctgacagtctgacggtgcatgcactggcgattaaacgggcagcaaaattcgggcaggagggcagaacgatggatctgcattctgagatttccgggatggtagaggatgcggctgaatgtgcagaagagatggggttaaagccgtattatctgtaccgtcagaaaaatattgcaggaaattttgagaatgttggttatgcagaggttgacaaagccggaatttacaatatacttattatggaagaaaagcagaccatcctggcagcaggagcgggagcttcgaccaagctcgtattgccggagaagattcagacggcaggcggaaaaaagacgaatctgatccgcatcgagaatgtgaaaaatattatggaatatatccatcgtattgatgagatgatagagcgaaaaggagaatggttatggcattaaagagaaaaccggttaccggaatgaaagatattcttccgggcgaaatggagatccgggattatgtgatcagtctgatcaaagagacatacagaacatttggattttcatccattgagacaccgtgcgtagaacatatcgagaatctttgcagtaagcagggtggagataatgaaaagctgatctttaagatcttaaagcgtggtgagaagctgaagctggcagaggcaaaagaagaggcggatctggtagacggaggactccggtatgacctgactgtgccgctttcccgttattatgcgaaccactccaatgagcttccggcaccttttaaggcacttcagatgggaaatgtatggcgtgctgaccgtccacagagaggccggttccgtcagtttatgcagtgcgatattgatatccttggcgagccgtccaatctggcggagatcgaactgatccttgcgacaacagcacttctcggaaagctggatttcaagaattttacaatccgtatcaatgatcgtcgtttcctgaaggcaatggcagcttacagcggatttgcagaggaagattatgataatgtcttcattacactggacaagatggataagattggtctggaaggtgttgccgcagagctgaaagaaaatggttatgcggaagagtcagttgagaaatatctgcagttattcaaggagatcacgaatgatgtggcaggcgtgcgttcctgtaaggagaagctggagggatttcttccggcagaagcagccgattcacttgagatgatcattacaagtgtagagagtgcaaaagaggcagagttccgtatgttctttgacccgacactggtacgtggaatgtcctactatacaggaacaatctttgagatttccatggatgagtttggaggttccgtcggcggaggcggtcgttatgataagatgatcggaaagtttacgggtcaggatacaccggcagtaggattttccatcggatttgagcggattgtcatgctgctgatggaacgtggatacaaagtgcctacaagtaaggaaaagaaagcattcctgatcgagaaaaatatgccgcaggaaagcatgctgaaagtgctggcacttgcaaagaaagagcgtgaaaatggccgtcaggtgatgatcgtgaatatgaagaaaaataaaaagttccagaaagagcagcttgcagagcagggatatacagagatcacagagtgctaccgtgattctgtggacagcctgtaagacggtagagcagagcgaaaagaaagagctgcgatagaaaaagcagcaataaaaagcatcgatagacagaacaggaagaaagtaaaaaggaaaggatgagatacaatggctgaatcaatgcaggggctgaagagaactcaccgttgtggcgagttgtctgcagtgaatgtcggtgagacagtgaccatcatgggatgggtacagaagaacagaaataaaggaggtctcgtattcacagatgtcagagaccgttccggaattatccaggtagtctgtgaggaggggacgacagaaccggctctgatcgagaaagcggcatccctccgttcagagtatgttgtggcgatcgttggtaaggtcgcaagacgttcgggagctgtaaatgataagattgcaacaggagagatcgaggtgatcccaagtgaactgaggattctttccgaggcaatgactcctccgttcccgattgaggaaaattcaaagacaaaagaagaaatccgtctcaaataccgttatctggatttaagaagaccggatcttcagagaaatcttaaaatgaagagtcaggttatgacgctgacccgtcagtattttgcagaagaaggattccttgaagtggaaactccgatgcttggaaagacaacaccggaaggggcaagagattaccttgtgccaagccgtgtgcatccgggttctttctacggtcttccacagtctccgcagctttacaagcagcttctgatgtgctctggcgtggatcgttatatccagattgcaagatgtttccgtgatgaggatcttcgtgcagacagacagccggagtttacgcagatcgatatggagttgtcctttgtagatgtggatgatgtgatcgatgtcaacgaaagatatctgaagaaactgttccgggaagtgctggatgtagaggtacagcttccgatccagagaatgacctggcaggaagcaatggatcgttttggatcagataagccggatctcagatttggaatggaactgacggatgtaagtgaagtggtaaaggactgtggtttcggtgtctttacagcagcactggagaatggtggaagtgttcgtggtatcaatgccaaaggacagggcggcatgccaagaaagaagatcgacaagctgacagcatttgtaaaagattacggtgcaaaagggctggcatatgttgccattcaggaagacggaaccgtgaaatcttcttttgccaagtttatgacagaggagcagatgcaggcactgatcgcagcaatgaacggagaagcaggagatctgctgttatttgctgctgataaaaataaagtagtatgggattcactgggagcattgcgtatagagcttgcgaagcagcttgaactccttgataaaaatgaatatcgttttgtatggatcacagagttcccgcttcttgagtggagcgaagagcagaaccgttttgttgcgatgcatcatccatttacgatgccgatggaagaagatcttcagtatattgagtctgatccgggcagggtacgtgcaaaagcatacgatatcgtcctcaatggaaatgagatcggcggaggaagtgtcagaatcttccaggatgacattcaggagaagatgttccatgcacttggatttacagatgagcaggcatacagccagttcggtttcctgttagatgcatttaaatacggagttccaccgcacgcaggacttgcttacggactggaccgtctggtgatgctgatggcaaagcaggacagtatccgtgacgtaattgcattcccgaagatcaaggacgcatcctgtctgatgacggaagctcctacgccggcagatacaaagcagttggaggagctgggactggaagttgtcacagaagaaaaataaaagttctcttcaggatgaatcaggctgagaatgagaatgtgagaaagaaaataaaaatcttcttgacaaatgaagtaaggaagactagaatagagttcatcaaaagcaaaaaccgatgaggaagagaagtaagttttaaaagaatttgcagagagcagcaggtggtgggattgctgtaaggattttaattccgaatggactttcgagggtggcctgaaatgaaaagagtaggagtcgccgggaaccgaacccgttatcaatcaggagcgtatgttagtacgtgagaaagtggacgcaggtcaatttgagtggtaccgcgatagtaaagaaatttattaccgtctcaagcatttcgcttgaggcggttttttgttgcatcagccggaaatgaaagcctgtatccaagatcggctcctttgcttttgcagaaaatgaaaagaaaaaaggagacaaagtattatgaagaaaagaattttagcagtagttttaggtgcggtaatggtaatgagcctggcaggatgcggctcaggaacatcaggagaggataaaaaagcttcctccgatggagaaaagacttatacgatcggaatttcccagtttgcagagcatggttcactggataactgcagggaaggattccttgaagggctgaaagaagagggaattgaagagggtaagaacctgacagtttctgtaaagaatgcagcggcagatcagggtacagcaaagcagatcagtgattcatttgtatccgataaagtggatctgatctgtgcaatcgcaactccgagtgcacaggcagcatacaattcagcgatggattcagaaatcccggttgtttatacagcagtcacagacccggttgcggcaaagattgcaaaagatgacggaacagcagtcggaaatgtaacaggaacgagtgatgagcttccgatcaaggcacagcttgaaatgatccgtgagatgatgccggatgcaaagaagatcggtatcctttatacgacaagtgaggcaaattccgtatccgctcttgcaaaatatgatgatcttgcaggagactatggatttgagatcgtagaaaaaggtattagccagaccgcagatatttctcttgcggcagatgaacttctcggagaagttgactgcctgacgaacctgacagataatacagttgtagcttctctggcaacgatccttgacaaggcaaatgcaaagaagattccggtattcggaagtgagatcgaacaggtgaagatcggatgtcttgcagcagaaggactggattatgtggcacttggaaagcagacgggaaagatggcagccaagatcctgaaaggtgagaagaaagcatctgatatgcagtttgagacaattacagaacctggtttttatgtaaataatgaagtagcgaagaatcttggaatcacagttccggaggatcttcaggacaaagctgtagaaagctttgatgagattacaaaataatgaaagaatccggaggcgtagagtgatggggatttatataacaatattggagcaggggctgatttatggaatactcgcccttggagtatacataacatataagattctggatttcccggatctgacagtggatggaagttttccgctgggagcagcactgactgcaacaatgatcacgaaaggtgtgaacccgtatctcacacttccggcatcatttctgatcggtgttcttgccgggatctgtaccggtctgatccatgtgaaatgtaaggtgcgtgatctgctgtccggtattattatgatgacagcattatggacgatcaacctccggctggcaggaacggcaaatgtaccgatctttggcgaggacagtatttttgacaatgcagccgtaaatgggatctttcagggaggagtatcctcgtataaggttctggtgatcgttctgatcattgcggtagtaagcaaagtccttttagatctttatatgaagacaaagtcgggattccttctccgtgcagtcggtgataatgaagtgctggtcacttctcttgcaaaagatgaggggaatgtcaagatcctcggacttgcgatcgccaatggactggtttccctggcaggatctattttctgtcaggaacagagagtttttgaaatttccagtggtacaggtgccattgttatcggacttgcgagcgtgatcatcggaacaagcctgttcaagaatttttcattcctgaaaaccacaacggctgttctgatcggttccattatttataaagcctgtgttgctgcagccttaaagttttttgagccgcaggatatgaaactgatcacggcagttttattccttctgattctggtgatcggaagagacagaaagaagaaggtgaagaaaaatgcttgaattaaagaaaatcgataaatattataatcccggaacagtcaatgagatgtgcctgtttgacggatttgacctgacggtagcagacggagagtttgtatcggttgtgggaagtaacggttcaggaaaaacctcgatgctgaatatcctctgtggaagtattcctgtagatggcggaaagatcctgatgaatgggaaagatattacaaataaaaaggaatttaaaagaaaccgtaacatcggacgtgtatatcagaacccatcgatgggaacctgcccgtcgatgaccattctggagaatatgtctctggcagataataaaggaaaattctttggacttggtgcaggaatcaataaggcgagaagagaagagtaccgggaaatgttgagccagctaggcctgggactggaaaataaaatggatgtaaaagtcggagtactttccggtggacagcgtcaggcaatcgcacttctgatgtcaaccatgacacccattgatttcctgatcctggatgagcatacagcagcacttgatccaaagacagcagagctgatcatggaactgacagataagatcgtcagagaaaagcatctgacaaccatcatggttactcacaacctgcgttatgcggtagaatatgggaaccgtcttctgatgatgcatcagggcgggattgtgatggatttaaagggagaagaaaaagcacatcttgaggtggagcagatcctggataaatttaatgagatcagtattgaatgtggtaactaggtctttcataaaaaagtagctttccacaaaaataaaaagacgggaacagcggattggctctgctgttcccgtctttttcgcgtatcatttctatagtgtgataatagaaatggttcttttgtgctgtgaaaggttattcgtcccagccttcgtaaaaacggatattgacagaaatattgcggatcagttcatcttcggcaaggagaatatcttccggatcggagacatgaggaagaatcggctcgtcctcttcgagttctaccgtgatccaggttctggcagcttcatttgcgttgtcgatggcatcatccagtgtctcaccggatgcttcgcagaactcaagatcaggaaagtaagcagcgtatcctccgtcagttttctttttaaatacagcgggatatataaatttcatgaatcatacctcctaaaatgatctatggtaaagaaaaaagcacttgaagtctttcgggaactcaagtgccttcagagcgacagacggggttcgaacccgcgaccccaaccttggcaaggttgtactctaccaactgagccactgtcgcatacagattgttcaaagaacaaccaaactataaaattgataaatgagagcgacagacggggttcgaacccgcgaccccaaccttggcaaggttgtactctaccaactgagccactgtcgcatattgctccgacgaacaataaatatattactatatcgtggaaaaattgtcaatatttttttgtgaaaaaaatattttcttaatagtttaggctttttaagaagaaaaaatcatggtatacttagagcgttaaactgaagcgttcagaattttgatgaaagaggtgtagttcattgaatacgattaaagttgcaatcctcggtcttggtactgtagggacaggtgtatataaactgatccagaagagagcggatgtgatggaaagaacggccggtgcgaagctggaagtaaagaagatccttgtgcggaatatgcagaaaaagcgtgaaggtgtggagcaggagcttcttacggataactggaaagagattcttgaggacgatgaaatctctgtcgtgatcgaagtgatgggtggacttgagcctgcaaagacgatgatcctggaggtactggaagccgggaagaatgtagtttctgcgaataaagatctgatcgcagaggaagggcatgtccttcttgatacagcacagaagaatcaggtggatttcttattcgaggcggcggtagcaggaggcatcccgatcatccgtccgttgaagcaatgtctggcagccaatgatatttcagagatagttgggattgtgaacggtacgaccaattatatccttaccaagatgacagaagagggaatggattttgcagatgcactgaaaaaggcacaggaacttggatttgcagaggcagaccctactgcggacgtggaaggactggatgcgggaagaaaagtggcgatcatggcatccatcgcatttcattccagagttgtattctttaatgtacatacagaaggaattacgaagattacggcaagggatattgcatatgcaaaggaatttgacagcgtcatcaagcttctgggtgttgcacataatacagaaaatggaatcgaggtcggagtctatccgatgatgatccggaaagagcatccacttgcttctgtacgggattctttcaatgcagtttttgttcatggagatgcagtggatgatgccatgttttacggaaggggtgcaggtgaatttccgacagccagtgccgtaatgggcgatgtgattgatgtggtaagaaatatcggatatggctgtacgggaaggatcagttgtacctgctataaagatctgccgatcaaggaatttggtcaggtgaagaacaagttctttatccgtatgcaggtcgcaaatgaaccgggagtacttgccgctattgcagaggtatttggagaccataaagtaagtattacgagggtagtccaggaacattctgcaccggaagcagcagagctggtgatcgtgacggagcgtgtgaaggaatgcaatatgcaggaggcactgaaagcactgatggagattccgagtatccaggagatcagcagtattatccgagagtattaaaggaatcagagtgtattagaaagaaccggatgaccggtacagaaaaggactgtgcggggagcgttgcaggaaaagagtggaagagaacggaggtgtacggatggaacggagaagtcagccgatcggttttatgatcaagcagatcaataatgtatttgaaaaagagttgaatgaaaaggtgaaaaagctggggcttacttcttcccagtgtgcagtactcgattacttatttcataccagtaaagatgagataagccagcgggatgtagaacgtcacctcagtctgaaaaatccaacggtgaccgggcttttgaagcggttggatgaaaagggatacattctctgtgttccaaatgcaaaagacaaaagaaagaaaaatatttaccttacggagaaagcctatgatatacaaaggcggatggaggcagagcggagaaagctggatcgggaactgacccgcgggatgagcaaaagagaagtagatgcactgatgagaaatctggaaaagcttctatataatgttgctgatccgtgaaagaagtattgagcttatggcagaaaagaaagactgaaagacaggagaacaggatgagttacgcagataaagtatttataaatatgtgcagggatattattgaaaatggaaccagcacagaaggcgaaaaagtccgtccgaaatgggaagacggcacagcagcttatacaataaaaaaattcggagtagtgaaccggtatgacctttcaaaggagttcccggcactgacattacgcaggacagcaatcaagagttgtgtagatgagcttttatggatctggcagaaaaagtcaaataatgtgcatgaactgaaaagtcatatctgggatagctgggcagatgaaaatggttctattggaaaggcctatggttatcagatgcaggtgaagcatcagtataaagaggggatgatggatcaggtagacagagttttatatgatctgaaagaaaatccctacagccgcaggatcatgacgaatatttacgtgcatgaagatctgcatgagatgaatctgtatccgtgtgcatacagtatgacgtttaatgtaacgaaagaggagggcagtgaacaactgactctgaacggaattttaaaccagcgttcgcaggatgtgctgacagcaaataactggaatgtatgccagtatgcagttctgctgcatatgtttgcacaggtatgtggcatgaaagcaggggaactggttcatgtaattgcagacgcacatatttatgaccggcatattcctctgatcgaggaactgatctcaagagagcctcttccggcaccgaaattctggctgaatccggaagtgaaagatttttatgattttacgccggatgatgtaaggctggaagattatgaaacgcatccgcagattaaaaatattccggttgcggtttagggtgaaggaggaagaggacagatgaaagcaatcgtagcagcagataggaattggggaatcggatatcagaacagattactggtgagcattccgtctgatatgaagttttttcgacagactaccacaggacacgttgtagttatgggtcgaaagacactggaaagtttcccaaatggacttccacttaaaaatcgtacgaatattgtgcttactgcaaataaggattatgcagtgaaagatgcgattatcgtacattctgaaaaagaattattggaagagctgaagaagtatgataccgacgagatttatgtgatcggaggcgaaagcgtatatcgtatgatgcttccatatttggatacaatttatgtaacaaagatcgaccatgcatttcaggcggatacatttttcccgaatctggatgaactggaagattgggaaatgacagaggaaggtgatgagcaaacctgctttgacctggaatttgcatttaccagatatgagcgtcgataggaagaaaggtgcaggattgaagaaaagaaaaatctgtagtgtactcatcgcagggattctgtcggtgggaatgattttgacgggatgcggagcaggacagccaggaggacagtcacaaaaaaaggtaacagaagctgagaaaaagcttaaggttgttacgacaatttttcctcaatatgattttgtacgtcagatcgcaggagatcaggtggagcttcagatgttattgaagccgggcgaggaaacccattcttatgagccgacaccccaggatatcatagcgatccagaactgtgacctgttcatttatgtcggaggagaaaatgatgcatgggtggaggatatcctggagtccatgccagataatggccgaaagacattgaaactgacggactgtgtggatacagtggaagaagagcagaaagaaggcatgaaggaagaacgtgatcatgaccatgaagacggacaggatcaggattcccatgatgaggagtcacattccgtccatgagattgatgagcatgtatggacttcacctgtaaatgcggaaaagatcgtggaagtgctggcagatcaactggaggaactggatcagaaaaatgcagcagtttataaagaaaatgccgcggagtatgaagaaaaacttcaggaactggacgggcagttccgggaagtagttgagaatgcagattccagactgcttatttttggagaccggtttccgttccggtatctggcagaagaatacggactggattattatgctgcattttcgggctgtgcatcggatacagagccaagtgcggcaacaatggcatttctgatcaataaagtaaaagaagaaaaagtaccgacggttctgaaaatggaattgagcaacgataatattgctaaagccattgcagaagcaaccggaacggatgtaaaggtattttacagttgtcataatctgacggcacaggaatttaaagatggggaaacttatctgagtatgatggagaaaaatgtggagacactgaaggaggttttgaacggatggcactgataaaatgtgagaatgtatcgatcggctatgagggtcagaccgtcgtccgggatctgaattttgagatcggccagggagactatctttgtattgtcggtgagaatggttcgggtaagagtacgctggtaaagagtctgcttggattgaaagcagtggacagcggtaaaattgaatttggagatggtctgaagcagaaagaaatcggttatcttccacagcagaacgattttcagaaagatttcccggccagtgtctatgaggtggtactttccgggagactgaacagccgcggattcagacctttctatacagcgacggacaaagcagaggcggcagaaaagatggagatgctcgggatcacagatctgagaggccagtgtttccgggatctgtccggtggtcagaagcagagagtccttcttgcgagagcgttatgtgcgacgaaaaaactgctgcttttggatgagccggtgacaggactggatccaatcgttacagcagaattttaccaactgatccaaaagatcaaccgggaatcaggaatcgcagtggtgatggtttcacatgatattgaaagtgcagtggagtatgcaagccatattctgcatttgcaggagacggtactttattttggaaaggcttcgcagtataaaaagagccgggcaggaaaagcatttctcggaggtgagtagcaatgatacaggaaattatagagatgatgtcgtatccttttatgaccagagcgtttcttgttggttcactggtggcactttgttctgctcttcttggtgtgagtctggtattgaagcgttattctatgatcggtgatggactttcccatgtgggatttggtgcaatggcgattgcagcagcaatgaatgcagcaccacttgcagtagcgatcccgattgtaatcgtggcggcagtcctgcttctgcggatcaacagtaatgcgaagatcaaaggcgatgcagcgatcgcactgatctccaccagttctctggcgattggtgttatggtgatctcgttgacaacgggaatgaataccgatgtatacaattatatgtttggaagtattctggcgatgagttcggatgatctgaagctgagtgtgatactttcggttattgtattgattttatttatattcttctatcataagatttttgcaattacctttgatgagacatttgcaagggcaacgggggtgaaagcaggtctttataatatgttgatcgcagttcttacagcagtgacgattgtgcttggaatgcggatgatgggagcgttgttgatctccagtctgatcattttcccggcactgacatccatgagagtatgtagaacgttcaagagtgttatccttaattcagctgtattgtcagtggtttgtctgatcgcaggactgacaatctcctatgtaggtgcgactccagcaggagcaagtgtggtccttgccaatttagcggcattgattgtgtattcatgcatcggaatgatccgtaaccgggcaagataaaaggaagcacgggcaaataaaatacatcaagaattgaacgttgacaagcctatttatacaaattataatatatataaatttcgcgttgacgtgtcagcagagaggagagagattctctgagatcaggtggcaacaaggatgaaatattcgccctgagcatgacgttcatgcttggggttttcttttggaaatagggaggtacagaatttgagacagattacaggaaataagttacttgtcagagctttgaaggaggaaggtgtcgatactcttttcggatatccgggagcctgcacgatcgatatcagtgatgagctgtataagcaggatgagatccgtgtgatccttccacgacatgagcaggcactggttcatgaggcagatgcgtatgcaaggacaacgggaaaagtcggagtatgtctggtaacgagcggaccgggggcaacgaatctggttacaggacttgccacagccaattatgatagtgtaccgcttgtatgttttacaggacaggtggcgagacatctgatcggaaatgatgcctttcaggaagtagatattgtaggaattacccgcagcattacgaaatacggtgtcacagtccgcaacagagaagatctgggacggatcattaaagaggcgttttatattgcaagaacaggaagaccgggaccggttctggttgatcttccaaaagatgtgatggcggaacttggaagtgctgtatatcctgattcagtgaatatccgtggttataagccgaatacgagtgtgcatatgggacagctcaagcgtgcgttgaagatgctgaaaaaggcaaagaaaccattgttccttgccggcggcggtgtgaatattgcacgtgcgaacagcatatttacagaggtagttgaaaagacgcagattccggtagttacgacgatcatgggaagaggggcgatcccgacgaaccatccactctttataggaaatcttggaatgcatggtgcatatggagccaatatggcagtcagtgagtgtgacctgcttttttccatcggaacaagatttaatgaccgtattactggaaagctgcatgagtttgctccgaatgcacagatcgtacatattgatattgatacagcatccatttccagaaatatccatgtagatgtaccgatcgttgcagatgcaaaagaagcgatcacgaaaatgaatgagtatgtagaaaaatgtgagacgaagaagtggctgaaaaagattgaagaatggaagatggagcatccgcttacgatgaagaaccgtcaggagatgggaccacaggacatcattgaggaaatcaaccgtcagtttgacaatgcgatcattgcaacagatgtcggacagcatcagatgtttacgacgcagtatattgagattacaaatgacaagcagcttgtcacatcaggcggacttggaacaatgggatacgggtttccggcggcaatcggtgcagcactgggaaatccggataaaaaagttattgctatttcaggagacggcggtatgcagatgaatattcaggaatttgcaactgccgtgctggaagaacttccgctgatcctgtgcgtatttaataatgaataccttggtatggtacgccagtggcagaagcttttctatggaaagcgttacggtatgacgaatctgaaggcaggtgcattatatcgtcgtaccaatgggcagaaaatgccggaatatacgccggattttgtaaaactggcagaaagttatggtgcaaaaggtatccgggttatgagaaaagaggatattgcggcagcatttgaacaggcaaaaaaagagacgaaaatcccgacactgatcgagtttatcatcgatccggaggaactggtttatccgatggtaaaaccgaacggtacgctggaagatatgatcatggactgctaggatgctaggaaaggaagtgaaaaagatggaaagtagtatgaagaaaagatggatttctctgtatgtagaaaaccaggttggagttctgtcaaagatttccgggttattttcaggcaaatcttataatctggacagtctgactgttggaacgacagaagatccaagcgtatccaggatgaccattgctacagtcagtgatgatgagacttttgaacagatcaaaaagcagttaaaccgtatgatcgaagtaataaaagtcattgattttaccgatgtttttgtaagaatgaaagagatcctctatgtaaaagtcttcaaatgtacaccggaagataaggtagagatttttcagattgcgacaacttttaaggcaaaagtgatcgattatggaaaggacagtcttttgatcgagtttgtgcagactgcgacaaagaatgatgcagtagtgaagctgatgaaagaagagtttaagagtattgaagttgtgcgtggcggaagtgtcggaattgaatcaatcagtatgatggaacgctagatcagagaacagggacaataaaattaatcagtggtttaggcagaagtgttgaaaaatgtgtgatggaagaaaggaagaaactcatgaaagtattaaaaaataaaataatatatacaggaaacggaaaaattgacaatggatatgtccgattcaaccagagaatctcagaagtagacgaaatgagaaatttcgtaccgcaggaagacgatgagatcattgagacagatgcgacttatgtgatcccgggatttgttgatgtgcatagtcatggaggatacggaaaagacagcatggatgcttccgcagatgagattgactggatggtacgtcagatggcagccaaagagggaatcacaacttacttctgcacaacgatgacgcagacttatgataatattgaaaaagccatggtgcagatcaaagaagcagcggaaaaaaatccgatcatccagggaatccacctggaaggaccgtttatttcagtcaactataaaggggcacaggatgcttcttatattaagaaaccagatgagaaagcacttgctcactggaatgagttaagcggaaaccgtatccgtgtggttacttatgcaccggaggaggcaacggaagaatttgagaactggtgtctttccaaccggatcgttccaagtgctggacattccgatgcaacttatgaccagcttgtggcatccagagcctgccatgtgactcatctttataatgcacagagaggtctgaagcacagagagccgggagttaccggatatggtcttctgaccgatggcgttaatacagagctgatctgtgacggtatccatatcagaccgcagatgatcgcactggcacataaagtaaagggtagtgacggaatcgaacttatcacagactccatgcgtgcaaaaggaatgccggaaggtaaaagtgaactgggtggacaggttgtctatgtaaaagacggtactgcacgcctggaggatggaacaatcgccggaagtgtactgacttatattaaagcgttccagaatattatcaagtttaccggtgtatcgattgaagatgctgtaaagatgtcttcaggaaatcaggcaaaagagtttggactgactcagaaaggtgcgattaagactggaaaagatgcagactttgtattactggatgaggaactggagttaaaaggaacgatcagttttggggaaatgatgtaaaatttgtatttgttggaatgatacgcttgtaaagcaaaagacttctttatggcgaagcggacgcggaaatcagggatattccttcgcagtgcaggcccgctttacctcagcccgttgaccgtttgtaactcgaaagtggaaatcttcgtgcaatggcactcgatttactttctctaacaaacgctgcaaagtgtcttcggaacgctcctgctaatgcacctgctcaggaacaccctgctttccgctgaccatctcgataagaagtttttagctccacagcatattcactcaacaatgcaaatttaaaaataagaagaagagccggaaggttatcgactaagatatcaaatcctgcagtttgcagattgcttatcctggtcaatagccatccggctctttatttcttattaaaatttcgtctttgttgggagaaactgttctggcatgagggaaaattttctaatttgaaaagcctaatatccgcccttgctgttgcgtgagcagtgcattgacagggagcgttccgaagacactttgcccaacttgttaaggaacgtaaacaggagtgcctctgcacgagtgtttccacattcctgttacaagttgtcaacgggctgaggtaaagcgggtcctgcactgcgatgcaacaacaagtgtggatatggacgctcttctgtcagaaacacttcctgctgtcgcgatattttcaccccgacaactacaaatttatcccaacactttcctcatatcctccggcagtggtgcttcaaaatgcattgcctcaccggtgatcggatgaatgaatgaaagtttccaggaatggagagcctgtcggttgatatattccatatcaggattatagagataatccccgaccaatggatgtccgagatactgaagatgtacacggatctgatgggtacggccggtttctaaaataagggagacaagactgtgctggttctgttcctttaatactttatagtgcgtgacagcatgctctccatgttcaaagtcaacttttcgctcaattatagagctgccagtacgggcaagaggtgcattgatcgttccagaagcaggagaaactgtcccccggacgatcgccaggtactctctgtggatttcatgacggactgccatgaaggataggatactggaactgacaagatgcttggcgattacagtcagccctgaagtatcacggtcaagtcggttggtacagcggaaaataaatggctttccctgttctttataataatacataagtgcatttgcaagtgaatttttatagttattcagcgaaggatgaataggcattcctgccggtttatttacaacaagcagatcatcatcctcataaatgatatccaaaggcagttgaacaggtgggatatgttcggagtattcagattcctgaatatggaccgtcagagtatcgccgcaggaaagtgtacttcgcatataagaccagattccgttgatcagaatactttcaggcattttcttaagctgagtcagattctgataggaatagcctttatgacggagatattgttctacacgtagtccgtgttctgattctgaaatctgataagtaatagttcgttccatatataaaaatcctttcaaagaaaattatttatttcaaaagaaactatttgagagtcaaaggctgataaaaataaatcgtatccattcagacacagatgatattatagcgtaatccggggatattttccaggattccggtagattctttcgggtggaatatgataaaatggggaatagacagcggaaatatgaaatagaaaaagcatagcagaagaaaagtgcttattatcagaatccgaagaaaagagaggatcataaattatggatattaatcagaaagtgacagaagaacttggggtgaaaaggtggcaggtggatgccgcggtaaatctcattgacgaaggatataccattccgtttatttcacgatacagaaaagaagtgaccggttctctgaatgatgagcagctcagaaagctgtatgagcgtttgatttatttgagaaatctggaagaaaagaaagagcaggtgctttccagtatagaggaacaggggaagctgacggaagaattaaagcagcagattcttgctgcagagacactggtttccgtggaggatctgtaccggccataccgaccgaagcgtcgtaccagggcgaccatcgcaaaggaaaaggggttagaaccactggcagcagttattatgttgcagaaaagtatggaaccattggaaaagatcgcagaagcgtatatttctcaggagaagagtgttgtatcagcgtcagaggctgttgcaggggcgagagatatcattgccgagtccatctcagataacgcagattaccggagctggatcagaaagattacgatgaataaaggaaaagttatttctacagcaaaagattctgaggcagagtcagtttatgaaatgtattatgaatttgaagaacctgcggaaaagctggcagggcatcggattcttgcattaaaccgaggagaaaaggagaaatttctgacagtaaaagtgcaggcaccggaagaagaaatcctgcgttatctggaaaagaaagtgatcgtgaacgaaaatatatatacaacggaagtattaaaagagacggtggctgacagttataaccgtctgatcgctccggccattgagcgtgagatacgaagcgaattgacagaacgtgcggagaatggagcgattgaagtatttggaaaaaatctgcaccagcttctgatgcagccaccgatcgcaggaaaagtggtacttggatgggatcccgcattccgtacaggatgtaagctggctgttgttgatgagaccggaaaggtgatcggaacgacggttatttatccgacagctcctacaacaccgaagaagatccaggcgagtaaggatcttctgaaaaagattattccaaagtaccatatttctctgatttctcttggaaatggaacggcttcaagagagtcagaagaatttattgtagaattattgaaagaaattcctgaaaaggtacagtatgtgatcgtaaatgaggcgggggcctccgtttattcagcaagtaagctggcaagtgaggaatttccgaagtttgatgtaggacagagaagtgctgcatcgatcgcaagaagactgcaggatccgctggctgaactggtgaagattgatccgaaagcaatcggagtaggtcagtatcagcatgatatgaatcagaagaagctcggtgaatcattaaatggtgtggttgaggattgtgtgaataaagtaggcgtggatctgaatacggcttctgcaccgttgcttgcatatatttcaggaatcagcagtgcaatcgcaaaaaatattgttgcttaccgggaagaaaatggaaagtttgccgacagacgggaacttttaaaagtaccgaagctggggccaaaagcctatgagcagtgtgcgggattcatgaggatccagggtggaaaaaatccgctggatgcgacagcagttcatcctgaatcttatgaagcggcagaaaagctcctgaagaagcagggatacaaagcagaggatattacaaaccataaattaacagggttatcattggcgatcagagattataaaaagctggcagaagaactggagatcggagagatcacgttgcgagatattgtaaaagagctggaaaaaccggcacgtgatccacgtgatgaaatgccaaagccgattcttcgtaccgatgtacttgaaatgaaagatctgaaagagggaatggttctgaaaggaacagtaagaaatgtcattgatttcggtgcatttgtggatatcggagtccatcaggacggactggtgcatatttcccagattacggataagtttataaaacatccactggaggctgtcagcgtgggtgatattgtggatgtaaaggtaatgagtgtggatatgaagaaaaaaaggattcagttgacgatgcggggaatataaatttgtatttgttggggtgatacgcttgtaaagaaaaagacttctttgtgacgaatcggacgcggaaatcagagatattccttcgcggtgcaggcccgctttacctcagcccgttgaccgtttgtaactcgaaagtggaaatcttcgtgcaaaggcactcgatttactttctctaacaaacgctgcaaagtgtcttcggaacgctcctgctaatgcacctgctcaggaacaccctgctttccgctgaacatctcgataagaagtttttagctccacagcgtattcactcaacaatgcaaatttaaaaataagaagaagagccggaaggttatcgactaagatatcaaatcctgcagtttgcagattgcttatcctggtcaatagccatccggctctttatttcttattgaaatttcgtatttgttgaaagaaaatatcctgatgcgaggaaagttttctgacttgaaaagcctaatatccacacttgttgttacgtgagcagtgcattgacagggagcgttccgaagacactttgcccaacttgttaaggaacgtaaacaggagtgcctctgcacgaatgtttccacgttcctgttacaagttgtcaacgggctgaggtaaagcgggtcctgcactgcgatgcaacaacaagggtggatatggacgctcttctgtcagaaacacttcctgctgtcgcaatattttcaccccgacaactacaaatttcttacaacttaaacaacaacgttgcaatattaaagtagataagaatcgagaacgtatctaccagtgtcgtgatcagcggagaagccatgatcgccgggtcaagatgaaccttctttgcgagcagtggaagcatacatccgaccatcttagccataatgactgttccgatcagagagaatgcaatcaccagtgcaagggacggattccgatactggatcaggatccggagtccattcacaatagaaagtgcagctcctacgatcagggagatacggaactccttgaatacaaccttgaagagatctttaaaatggatctcatccagtgcaattccacggatgatcagggttgcactctgggaaccacagtttccgccggtatccatcagcatagggatgaaggaaaccagaagcgggattgcagcaaaagcgttctcgtatttcgtgatgatcgttccggtgataatggaagtaagcatcaggatcagaagccagggaatacggttcatggcatgctggaagacagaagtatcaaaataagttttttcacttggattgatagcagccatttttgtgatatcctcggttgcctcatcgaccatgacatccattgcatcatcgaaagtaacgattccgaccatcagtccatcggcatccaggacaggaagtgccagcagatcgtatttggtgaaaagctgggctacatattcctggtcattatgggtcgttacagaaataatctccgtctccatcaggtctttgatcggaacatcatcctcagtcgtcatcagatctttggcactgacgatgccgaccagctttctgcgttctgtgacgtagcaggtatagatcgtctctttatggattccggtacgcttgatatgagccatggcctgtcccacggtcattgtatcacgcagatcaacatattcggttgtcataatgcttccggcactgtcatccggatagttcagaagctggttgatcatcttacggtctgtcgcactgacggtgttgaggatacggttgaccaggttagccggaagttcttcaagcatatcgaccgtatcatccatatacaggtcatctaaaagttcttttaactctttttctgtgaacatttccaccagataggactgcatggaagtatccatattggaaaatacttccgcagctttatctttgggaatcaggcgaaatgcaagagcaagctctttgtcatcaagtttcgagagaagtgaggcaatgtccacttcgttcattacgtccaggatacttctgacagctttgaactgacgctgctggagaagcttgataaaaatctctttgttcatgatagatccctctcattctgtcattatttaccattaagctgcatatgtggtaaccactggcaccagagtccatgacctcacctcccttttatcttagaaaaatcatttcgtgaagtatctttaaaatataaaaactccgtcaatgcccgaacaatgacggagtctgaaccccaactaaataatagcaccgttcaagctttagcatcacagggcatataaattgcattaagttgcgccttcgcgacgcagcctgctaaccagctcatcgtgtctccacaattccgcggtagcaatcttcggatttaacgacataagccgaatcatccaatccctgtggtaacctcacctaccgaaatgatgtagttatttaaattccttaattattgtagttcacagaccggggcgtgtcaagttaaatagaaaaacttcataataaaattgagtaaatagtgcggttccctacatatactgttaagaaacagaaaaggttaaattatagagtgcattctaaaatcaaatctgttataatcaatgcgtggacaaaatggggaaaacctcagaaatatttagaagaaaagaggaaaagtaatggattataaaattacaggttatgagccggaaaagttatttcatttctttgaagagatcagtgcgatcccaagaggttcgggaaatgaaaaaggaatcagtgattatcttgtgaaatttgcaaaggacagaggtctggaggtgatccaggacgatgcttataatgtagtcattaaaaaagcgggaagcagaggggcagaggatcatgcaccggttatgcttcagggtcatatggatatggtctgcgagaagcgtgcaggggtagagcatgattttgaaaaagatgggctggatctgatcatccgggatggcagactgacggcaaatggaacgacgcttggcggggacaacggagttgccgtagccctgatgttgatggtgctggatgatgatgagatcgaacatcctccggtagaatgtgtattcacgacagaggaagaagtaggactcaacggtgcgaaagcattggacaagtcggtgctgaaagcaagaaccatgatcaatatggattcagaggatgagggagttgcaacggtaagctgtgcaggcggtctccgagttcagtttacaaaagagattcagagaactaccgtgcagggcagccttctcacgctgaaagtcgaaggactcttaggaggacattccggtcaggatattgataaagagcggcagaatgcagatcttctgatggcaagaatgatacagagattattaaaagagacaaaaggacagcttgtaagctttaacggaggaacgaaagataatgcgattccgagagagtgtgaggcatctctgatctatgaatccgatgaagaagctgcgaaggcagaagaactggcatgtgagctggcagaaacttatgcagaggaactgacaccggctgagccggatttctcctgtgagatttcctgtgagacaaaccgtactgctgaagcaatcccacaggatgcagcaaaagaatttatttgtgcgatgcgtcttgccccgaacgggattcagaagcgaaatatcaaaatggatggatttgtagttgtatcattgaatctgggtgtggtcagaacagaggaagaccggatcgttatgatcttttctccacgttcttctgttgcatcacttcaggaagatacaaaagaacgtctgaatacactggcagaaacttttggctttacagtaagccatagttcagagtatccgggatggagctttaaagaagactctccggttcgtgagatctgtaaggaaagctataaagaattatttggggaggatctgaagattgaagcaatccatgcgggactggagtgcggattgttctctgatgcgatcaaaggactggatgcgatcgcgatcggaccgacgatcgccaactgtcatactccggatgaatatctgacgttggattcttttgaaagattctatgagttcttaaaagatattctttcacggctggcaaagtaggaaaatctgttccgcagtccggtaaagaacagccagagagagctgagttatataaagtctgaaaaagaaaaaggaggaaatctgaacggtatcggtctgaaccgacaccgcgtcagagtttcctccttttttggaaagagcagagtatgatcaggataatccaggatcattcacagactgctttaatccttacgaatcttataaaaaatctttccattctgacgttcctcgaggatcattttctgcttgatcatataaggcagaatggagtccaggaactttttcggatcagtgactccgatggaatcctgcataaaaggctgctttgcagtaagatcttttacaaaaggttctaactcttttctggttaaaggacctttttttttcagaacttttttcactgcggagattcctttggcactgagcatattggcgaggtcctgattctgtcgtgaagcacgccagagtccccagccatagacaatcattgttgccactgcaaaaagaagaacataaggaaggtatttcaggatcgtttccattatttatgcttttctcctttccagtagatgagatgattatcatgtagtatttcgaggtatttgatcagacggggaacaggctttcccattttcggaaactgttgttcgagttctttggaaatctgatggacatcctttttcccgtcgaccgcattccatacaaagcttccaagctcatcaagccggatatcactgactctcgggcgtcggaacagcttttgtgcgattttatgataaaatcctttccattcgataaggacggtaataataccgtcctcatctgcttcatattcaatttccggattcttttccggaacaaaatccagatagtttttactgtctttctttttcatgaaatccttattccttatctgctttcatgcatactctgtaaagtaatgcaagtaatgcgatgaaaaggatcagactgccgatctgcggtaactggaacggcagaacgatcttgctgtcgatcttaaaaactgcaaatactgcaaggaggataccaacgataccttctcctgcgatcataccggaagtaaagagcagtccacggtctgtgcgggctttcttttccttctctgttccttttctcttttcaaccaggatgcgtacaacaccaccagccatgatacctgcacttaaggagaacggaagatacataccaactgcaaatggcataaccggcatatgaagaatctcaactacgatggcgataaacacaccgataaagataagggcccatggaagttcaccgttcatgataccctcaacgagcatcttcatcatagtagcctgagctgccggaatcttttctgtaccatatccccatgcctcattcagaagatagagaacaaatccaattgctgctgcggaagcaaccacaccgatgatttcaccgagctgctgtttcttcggtgtagcacctacaataaatccggtctttaagtcctgagaagcatcaccggcgattgctgcaacgatacagatgatgccaccgatggaaatagctcctaccatacctgtaataccagttgaaccggtagccttgaggataacagttgcaaaaagcagtgttgcgatcgtcattccggataccgggttgttggaagaaccgatcagacctaccatacgggaggatactgtagcaaagaaaaatccaaatactacaatgattaatgcaccgatcagattcacagggaatgtcggaatcagccagatcagtactgcgatcacaagtgcgactgcaatcagaaccgggatcggaagatcctgctctgtacggagtcccttatgtgctgcatttttattcttcatactgtcaatagcctgtttaaatgttcttatgatcagaggaagactcttgatcagactgatgataccacctgttgcaacagctcctgctccgatgtatttaatgtaattgctccacaaagcacttgggccgccgccctccatagtaagaagttctgttactgttttacttgccgggaagatggttgcatctgcaccgaataatgcgatcaatggcatcagtacaaaccaactgagtgttccaccggcaaacatataacttgagatcttcggtccacagatataacctacacctgcgagggcaggaagtacctggataccaacctgagatcctttgtagctttcaaatgcatgaccaatctcactcttaaagagctgtgttccgtctgcaaggaatttgtacactgctgcaatccccagtcctgcaaatacagtgccggctttagaacctccctcttcgcctgccagaagtacttctgcacatgcagttccctcagggaatggaagtgttccatgttcttctacgatcagagcctgacggagaggaaccataaagcaaacgcccaggacacctccgaataatgcgatcaggaagatcgtaagaatacttggaaaatcaatttttccttcctctgcccagaggaataatgcaggaagtgtaaaaattgctcctgctgcgacagactcaccggcagaaccgatcgtctgtaccatgttgttctcaagaatggaatccttacggagaatcacacgtattatacccatagaaataactgctgccgggatagaggcggacacagtcatacctacgaggagtccgagatatgcgttcgctgccccaaatacgattgccagaaggataccaatcaagagtgctgttaccgtaaattcaggaacgactttgtcggctggaatatacggcttgaagtctttcttgttgttgtccatttctcttttcctttcttttgtatatttcttgctaatgattagcatagcttcactattatatcatgataaagtgataaaagaaagcgaaaaagattaaaatgtcaaggaaataatgtccaaatatggatgaaatcgtagaaaacgggtcagaaagacctggcagcaacttcgtaaagacttgattttgagaatagatattacacgaaatatgtgataaaataaaaagaagtatgtcatttttacagagaaatggaggttacatcggatggaagcatatacggggtttgcagcagtctatgatattttcatggacaatgtaccttatgaagagtggagcagctatctccatggtctgcttctggagcatggaattgaagaagggatcgtattggatctgggatgtgggacaggtgcgatgacagagcggctggcagcattcggatatgatatgatcggagtggacaattcagaggatatgctggagcttgccatggaaaaaagagtacagtcagggcaggatattctgtatctgttgcaggatatgcgggaatttgaattgtacggtacagtgcgtgcggcagtgagtgtctgtgattcggtaaattatattacagagcctgaagagctgaaagaggtattccggctggtgaataattacttagatcctgaaggcgtctttatttttgattttaatacagtatataaatataaggaagtaatgggagataccgttatagcggaagaccgtggtgaatgtagttttatctgggataactattactatgatgaggaaaagatcaatgaatatgatctgacgctgtttatcagggaagagggaaaagagaaaaatttgtaccggaagtatcaggagacgcattatcagaggggctatacattagacgagatgaaagagctgattcaaagttcgggcctgatctttgagactgcttatgatgcatttacccatgaagcaccgacagaaaaaagtgaacggatctatatcattgcaagagaatatggaaagttacagaaataagcaagaaattttatgatgagaaaggaaaagaagaatgaaagattatattgtcagggcaaccgcaggaaatacgcagatccgtgcttttgccgcagtaacaacgaagctggtagaagaggcgagaatccatcatcagacaagtccggttgcaacagcagctctgggacggcttctgaccggtggagtcatgatgggaagcatgatgaagaatgataccgatatgctgacgatccagatcaactgttccggagatattgaggggctgacagtgacggcagacagtcagggaaatgtaaaaggatatgtatttaatccggatgtcatgctgccaccaaagaatggaaagctggatgtaggcggagcattgggccagggagttatgacgatcatcaaagatatgggcctgaaagaaccatattccggtcagacaatccttcagaccggtgagatcgcagaagatctgacgtactactttgcaacgtctgagcaggttccgtcttccgtaggactgggtgtactgatgaacggagataatacggtcagagttgccggaggatttattgttcaggttatgccttttattgaagatgaagtattaaataaactggaagaaaatattaaaaagatccgttctgtcacggctatgcttgatgatggacatacgccggaacaaatgctggagcaggtgctggaaggactagatcttgagatcacggatacgatgccgacacagttctactgtaactgttctaaaaagagaattgaaaaagcaatcatcagtattggaaagaaggaaattcaggagatgattgatgaaggaaaagagattgaagtaaaatgtcacttctgtaatacagcctatcattattcagtggatgaattaaaagaattattaaaaaagagcagataaatttttaaagttctgcaggaacggactgagaatgaaaatgataaaaatccggactgaggaacggatcagcgaaaggagaagcatatgagacatggatttgtaaaggttgctgcggcaacaccggatatccgggtcgcagatgtagagtttaataaagagaatatttgcagagggattgaagaagcagaaaaggcgaacgcaaaaatactggtgttcccggaactgtgtgtgacaggatatacgtgcagtgacctgtttgaccatgcggttttactgaaggcagcgaaaaaggctctgttggagatcgcagagtttaccagagacagggatctgctggtgtttgtgggagttccgcttgaggtggatggaaagctttacaatgtggcagcagccctgaatcatggaaagatcctgggactgacgacaaagacatttcttccgaattacggggaattttatgagatgcgtcagtttactcccggaccggagaaggcgagatatatttcttttaacggagaagagatcccgttcggaccacagattcttttccaggcagcagaaatggaagatctgatcgttgcagcggagatctgcgaggatgtgtggtcaccggttccgccgagtatcggtgcggcactggaaggagcaactgtgatcgtaaactgttccgcaagcgatgagacgatcggaaaggatacgtatcgcagagagctgatcgcagggcagtctgcacgactgatcgcaggatatatttatgcaaatgcaggagaaggagaatcaacaacggatcttgtctttggcggacataatattatcgcagaaaatggaacaattctgaaagaaagcggtcgctatagaaatgaaattatttactcggagtttgaccttgagagaattacgggagaaagaagaaagaatacgacatttcagacagcaaaggaacgcagcctgatccgggtaggattccagatagaaaaaggagaaacttctctgacgagaacatttccaaagaagccgtttgttccgtcagatgaacagacgagagctgcacgatgcgaggagatcctgacgatccaggcaatgggactgaagaagcgtcttgcccataccaatgcgagaaccgcagtggtaggaatttccggtgggctggattctacgcttgccctcctggttactgcgaaagcatttgatatgcttggaagggataaaaaagatattcttgcggtgacgatgccgtgttttggaacgacagaccgtacctatcagaatgcctgtgagatgtcgaaaaaggtcggggcaactctgatagaggtgccgatcgccgaggcggtgaatatccatttccgggatatcggacacgatcccgaggatcacagtgtcacttatgagaatggacaggcacgcgagagaacgcaggtattgatggatcttgcgaataagacgtggggcatggttatcgggacaggcgatatgtcagagcttgcacttggctgggcaacctacaatggcgatcatatgtccatgtacggggtgaatgcctctgtgcctaagacactggtacgccatctggtcaaatatgctgcggatgatacggaagatgagcagctccgggaagtactgtatgatgtactggacactccggtaagcccggaattacttccgccaaaagacggagacatcgcacagaagacagaagatctggtgggaccgtatgaattgcatgacttcttcttatattttatgcttcgctttggatatgagcctgcaaagatctatcgtcttgcctgcagtacttttgagggggaatacgacagggaaacgatcctgaagtggctgaagacattctgcaggagatttttctcccagcagtttaagagatcctgtctgccggatggcccgaaagtgggaactgtggcactttctccgcgtggtgactggagaatgccgagtgatgcctgcgttgctgtatggatgaaagaactggagactttataaaaagaaaagatacgataaagagaaaatgtaaaaaaagaaaagatgcttttccggaaatggcagatacacccggtcgggagtaaaggtcagatcaaagaaaagcatctttttcagtatagtcctgattggcactgaaggaaaaaactgctgcaaaaagcttcacagtaaaattcttatacagcggcgatcacttctacttcgcagaggactcctttgggaagatcctttacagcaacgcaggagcgggccggatttccggtgaaatattttgcatatacggcattgaatgctgcaaaatcagcaatatcagcaaggaaacaagttgtctttacaacatctgtaaatgctgcattctgactgtcaagcagtcctttgatattcttcatgacctgttcagcctgttcctcaatggtagttccgaccacttcacctgtctgtggcgaaagaggaacctgtcctgaaaagaaagcaaatccattcacaacaactccctgggaatatggtccgatcgcagccggagcctctttggtttctacatattttaacatgatctctacctccatttttctgagtaaaaattactataaatcattataaacccggcctcggatttttgccaccctaaatttaaaaccatattgaagacgaaaaaaaatagtgatatcctatatctgaaaaaatggtcagttgcgtattgcagcgtgaatgaaagagaaaggagtgcggcagtattatgaaagcagtacagcgtgatatgacggtgggaaagccgatgaaagtaattataaattttacattgccgatttttatcggaaatgtgtttcagcagttttataatatggcagatgctgtgatcgtgggaaagtttgtcggtacgaaagcactggcagcagtcggaagcaccggaacgatcatgtttctgatctggggctttgtcgcgggaatgacagccggatttacggttctgacagcacagaaattcggagcgggcgatatggatggaatgaggaagactgttgcgggggcaggcatcctttctttgggaatcggactttttctgacgattgtatttatggcatttatgaaaccacttctgattcttatgaatacaccggaggatattttccgggatgcatatgcttatattatgattgtcagcggaggaatccttgcacagatgctgtataatcttctgtccagtatcctgcgtgcgttgggaaacagtaagttgccgctttattttctgattatcagtgcggtgcttaatattttcctggatctgctcctgatcatcgtcttcggactgggaactgcaggagccgccattgcaaccgttgtcgcacagggaatatcgggacttctctgcctgggctatatcatgctgaagcttccgatactgcatctgaaaaaggaggaccggcacgtaggaggtcagatctacctgacgcagatccgcatcggtctgccaatggcattgcagtattccattacagcgattggaactatgatggtgcagacttcgctgaatattctcggttctacactggtagcggcatttactgcggcaaataagatcgagcaggtagtgacgcaggcatatgtggcaatggggacaaccatggcaacttacggggcacagaatatgggagcgggcaatgtcccgaggattcgccagggattcaaagcatgtacgattctgggagttatttattcttttattgcagcagcatttgttatgactgtaggaaaatatatgacttacttatttgtttcagaaaatgttggtgtgatcatggattcggtggagatttatctgtggtgtattggaatctgttttattccgcttgctgtagtgaatatttacagaaatggaatccagggactgggctatggacttcttccaatgatggcaggagtggcagaactggtcggaagaggtgctgttgcagtggctgcggcaaagcagagaagttataccggagcctgtatggccagtccggcagcatggatccttgcgggatcgctgctgctggtcatgtattactatatcatgaaagttgatatgaaaaagattttcggaaagtcatcctcataacgcagggagagagaacaggagtctgccgttatattcagactttcttcagaaaaagaagggaaaagatacatacgatcccctctgttaccgggagtgacatccagatcccggtgagtccgaataaatgagccagaagaaaagcggccgggatgatcagcaggaatcctcttagaagagagaggataaatgcctgttttgggtggtccgtggaacttaaaaatactgcggcaacgatattgatgccggagaaaaagaggctggtaaagtagatcctcattccgtcggccgcaatggaagtaagggcggtgttctgatctttattgaacagatcagcaatggggtcagccagcaggaagataactgcgtaagaaagcagagccagaagcagagcggtcaggagtgcatagcatctgatctgatggcggaccggctgtcctttttttcctggatggctgctgacgatgggctggattccctgagcaatgccggtggagatggcaataagaaccagtgcgatgtttgcaaggaccccataggcagcgacaccggtattcccgcttaaatccaggagcaggaaattaaatacgagaatcacgatcccggaagaaacttcagtgatcagggaggagacacctagagaacagatcgaggaagctgtgctgagggaaggttttgtcttcatcagccggaagtggctgtttcctctcagaaaatgagtggaaagaatccccatactgatgagcggtgcggtagctgtggcaagggcggcacctaccatgccaagattcagaggataaatgaaaaggtaatccagcaggatattggagaggcttccgatgatcattcctgccatggataaagcgggttcaccgtcatttctgacaaagcatacgagaaggttattggccagaaataagggggcaaatgccagcaggatacggatataggggacggcaaaagggagtgtccggctgtctgctcccaggagaaggcataaaggctctgccccaagaagtcctgtcagtgcgaaaaaaatagctgcgatgactgccagcaggacggactgtgtaaagactgtgcggtgcgtttctccttccgggtgcgtggaggagagggaataacgtgaaccgcctcccattccgatcatgagaccggttccgttgagcagactgtatgcaggcagaaccaggttcagggcggcaagtgcatcggagccaatgcctcttgcaataaaaaaggtatcagcaagaatgtagcaggaaaagccgatcattccgagaacattcgcagagacatatttcagaaaaagtgaaaaaatatgcccggaagtgtcggaactgtggataacttttgtatctgacataaaaaactcccttctgagtgcggttaggtgcggttaaatgatgaaaaaggcattcacttttcgtcccttctaataaccggtctgttacctgtcttcagcctgtgcatatcacctgaaaactggtcaaagaggtattagagcctgtcggtccgaaaatgaatgccttacgatcttacccggcggcaagatccacattttcatataaaactgtaggtatgatatcatagatatcaggggaaatcaaatctttttttcaggatgaatcaggtgtaaaataaaaagaccgagtggaaaatgaaggagaacgaccgatgaataaaaaagaagtactggagatccgtaagcagttttcgccgaagaactgtgcgatcacgagaatttgtggctgctatgtggatcatgagaaaaataaaaagatggaatcgaaagaagcctttctttccctgccggaagaagaggcatttaaatattttgatatttttaagaagacactttcgggttcgatcggtaaaaatatgattaatatggaatttccaatcgatgcggaaatgccgggaggaacgcaggagttcctgctgaaactccgtgacagcagactggaagatgatatgctgctggaagaattttacgacaaggtgatcgctacttatgaatatgcggagaattattatattattctgatccatgccatgtatgatattccgggaaagtcttctgatgatatggaaatgtttgacgcttcagatgaagtatatcagcatatcctcatgagtatctgtccggtgagtctgtccaaggcgggacttagttataatgcagaggagaattgtattcaggatcgtatccgtgactggatcgtggacagaccggataagggatttttatttccggcgtttaatgacagaagtacagatcttcacagtgttctttattatacgaagaagtcggaagatcttcagccggagatgatcgaccagcttttgggagctaagatgccgatgtctgctgatactcagaaagagacatttcagatgattatcgaggatacactgggagaggatggagattatgaaacggtccgtaatattcatgagacgctgaatgagctgattgaagagcataaggaagaccctgatccgctttctctggataagacggatgtgaaaaaaatatttgagcagagcggtgtttccaatgaaaagatggaaaattttgatcagaattttgaggaaaatgcaggggaaaaggcatcgcttcttgcatccaatatcgcagagacgaagaagttcaatattgagaccccggatgtggtgatcaaagtcaacccggagcggatggatctggtagagaccagaatgatcgacggaaggcaatgtctggtgattccggtggatgatcatattgaagtgaatggactcaatgtcagaacgatgaaaataaagacagagtgagaagcgaaaagccgagagactggttaggatatccgttcgggagtatttcctgcatgagaagaaatactcctgaacgggattttttctttgaagtatttgaaatcgtatctgaacgggatttctatgcgttctgagtttataggatggtatactgcatcagttcataatgcagcgtacatccttcaacgatttctgcagggagcaatgccctggcaacaagtttcaattcttcatccggcagatcagttcgtcttaaatgagcataatctccgtcaatctgctcaacaatgtaatcgcataccagcattttgaaatctcctttctttcattcgctcgctaacgctcattatatcatgatcggcatcgatgatgcctggagctgctttgcagcgatcatgatcgtcattcgccactcgcactgaaaaagcaatgctttctcctgatcgttaacgctcattatatcatacagaaaaaagaaatggcaaattacttattataagcagatttacgaggaagaagggcttcagggattgctggagcagttgtgatgtgataaaaacagagtgagtatatagttctggtttataagccggtgacctggaggaagaggtgactggtttttctcttaaaaaatcctcctgttttttcgtgaaatcttacaaaaatcaattcccgtctttgtgtaaaattccaaaattgaaaacgataacaaaaatagctttgacaaatcgaaaatcagggtgtattgtgtaatcacaacaaagaaatacagtagcaacaacaaggagatgataaattggcaacgatatcagatgtggcaaagctttcaggattatcagtctctaccgtatcaagagttatcaataataagcctcatgtatcagaagcaaaaagacagcgggtacaggaggcgatggatgcactgggatacagtcccctgcaggcagcaagacagatgagaggttccggttcaggaaatgtggctgtggttgttccgacgatcacgaataacttttttgctcatctggttgattcaatcgaaagaacatgcagcaaatatgcatacaggacgttgatcatccagacttacggagaacgggcaggagaggaagaagcattgaatctgcttcgtatgcagcacgcagacggtgcaatcctctgtgcgattgagaaccagtgggaactgatcaggaagtttacccagtatggcaggctggttgcatgtaatgagtacaatgaagaccatgagatctcaatgatctgtggaagacaatatgagggatttcaaaaagcaaccgagtatcttttaggtaaaggacatcagagaatcgcttactgtacaggagcaaaagcgttggttttacagccaaagggactgaatatcgacagtgaccgctacagaggttttattgagacattaagcaaggcgggaaaaagtgctgacccggatcagatgtttacgagaatacatacgatggaagatggaaagagagtgatgaaaaagatcttaaatctctctttgcaggaaagaccggatgcagtcattgcaggaagtgatgaagtagcagccggaatggtgatcgaaggacttgcaaatggaatccggatcccggaagatattgcaattctgggagtggatgaccagccgctggcatcctgcatacagattcctctgacgacgatccgtcagccgattgctcaggaaggcgagtatgcggcaaaagaaatgatccgtcagctcagggacggagcggaagatacgatccgcaaagaactggatcttgaattagtgatccggcagtcagcctgagggcagcagtaatttagtaaataaccagtacgaaatccagtgctggtttttaaaagaaacaaattggtaacgataccaaaaaagcaaaaatcaaggaggaaaagaaaatggtagtattagcaagagttgatcagagactgattcatgggttgatcgtaaaccagtgggcaccacatcttcaggtaaaaagatttatggtggtagatgatgtgctttgcaataacgaagagatcaaggcaagtatgagaatggcaaagccggcaggaacaggagtgtctgtcatcagcacagagacagcaatcgccaattttaaagccggtaaatatgacggacagagagtgttcgttcttgtaaaagagccggagacactgatccgtctgatggaaggcggcgtcgagatcccgaaagtagatcttggaattattttcaatgagaatggaagaacaccggtcacaaaatttattgcactgaatgagaaagaaaaagcagatcttgaaatcatcagaagcaagggtgttccgatcgtgatccagtatgttccgactgatgcagaagaggcatactgattcagaaaaatatattgattcagaaaaagaaaagatcagtgtcagataagtaaaaaattgagaggtgacagatatgcatatcatacaggatatattaatcattcttttggcagggtacatgacgatcgaccagaatggtccggttgttatgtcctggttctccgtaatcgttggtacaatttcaggtctgatcatgggagacttaaatacaggtcttatgatcggaggtacattccagttgatgtcgcttggtgtggcagcacttggaggagcttctgccccaaattacggacttgcaacaattatcggtacatttatcgcagtccgcacaggaacgggaattgatgcggctgtaggtgttggacttccggttggacttcttgcgatccagttagaagttgtagtgcgtattgtaaataactttgtagcacataagatgcagagtgataataatgaaggaaaatggaaaaacatgaaccggatcgcatgggtcggaccgctgctctgttcccttcagacaatcattccaacagtgatcgttgtatgctttggtgcaaatgtagtgaattttatcctggatgtgatcccacagtgggtgacagacgggctgtccattgcagcaggaatgcttcctgtagtcggtatcggaatgttgatgcgttatatgccggttaagaaattccttccatttattctgatcggatttgtactttcagcttatctgtccatgccggtactcggaattgcgattgtcggatttgccgcagcattctggtattttacgacagaaatgaaaaaagccgcagaggcagagaaagcagtagctgttacaacagtggatgagatgggagatgattttgatgagtaagatggaaaataatacagtaaataaagcaggcagcacaggtgttgagctgaacctgaatgatggaacgcagcgttatcaggtaacaaaaaaagatctgaaaaagacagccgacagatataactttatggcatgtaacattttcaattacgaatcccagatgggtccggctgtagcatgggcaatggcaccggtacttcgtaagatctataaaaaagatgaagaatacaaagaggcactgaacaaccattttaattatttcaattccacaacagtcatgtccagtatgatcctgggtgcgacactggcgatcgaagagaaggacggcatcgaggcgaaagagacagtacagtcgttaaagaccagtctgatgggaccgtttgccggagttggtgatacgctggtatgggttctctggccgacgatcatgggatctatttcaggatatatggcacagcagggaaatccgctgggtgcgatcatctggtttattgcaaacatcattttctggtttgtaaagagaaaaatgtttgaagtgggatatacttcaggaacaaagctgatcacaaaccttggaaaaagccttacgacatttacagaagccgcttctatcatgggactgagtgttgtcggtgcattgatcgcttcttctgtaaaaatgacaacagcattaaattttaaagtcggggaagtttcactggcacttcagaccgatatacttgacaggatcatgccatccctgcttccggtacttctgacagcacttgtctacaagctgctcggaaataagaagtggacagcaacgaaactgatccttctgattattgttattgcactggtatgctctttctttggaatcctcacagtatagcggaaaggaaataatatctatgaaaagaattttagttacagcatctcatcataagatggcagatggattaaaggatactctgaattttgtttcaggcggagtgcaggagacgattgcactctctgcctatctggataaccagccggtggaagaggcagtcgatgaactgatgaaaggatttgcagaggaagatgaagtgatcgttctgacagacctgacttcaggaagtgtgaaccagcagtttttccgttatcgcaacagaccgcatacgcacattgtgagtggtatgaaccttccacttgcatttcaggtagccatggagccgcagggagaatatatcacggtggaacggatgcgtgagatggtggaagaagcaaagaatgaaataaaatatgtcaatgatatagcagacgatggagatgacgaggatgagtaataaaacggcatggtggaaaaagagtgtagtatatcaggtatatccgaaaagcttttgtgattcaaatggagacgggatcggggatctgaatggaatccgcaaaaaaattccttatcttgcaaagctgggtgtggatgttctctggttgaatccgatctacgcgtctccgcaggtggataacgggtatgatatttccaattacagagagatcgagccgacatttggtaccatggaagattttggaaatctgcttgcagaagcacatgaggcaggtctgaagatcattcttgacctggttgtaaatcatacctctgaccagcatccatggtttcaggaatcaagaaaaagtaaggacaatccttacagcgactactatatatggaaagacgaagtaatcaataactggggatccagcttcggcggatctacctgggagtatgcagaggagcgtgcccagtattatctgcactgctttgcaaaagagcagccggatctgaactgggaaaatccgaaagtgcggcaggaagtatatgatatcctgcggttctggctggataaaggaatcgatggattccggatggatgtaatttcgcttctttcgaaagatcagagttttccggacgggccggtgattcagaataaagcttacggaagttattatgccggatgtgcaaatggaccgagagtacatgaatttctccaggagatgaaccgggaagtattgagtaaatacgatattatgaccgtaggagagacaccgcataccaatgcagatgaggcggctctttatacagatgaatcaagaaaagaactgaacatggtctttcattttgaccatatgcatctggattatgatgagaatggaaaatatgcaacaaaccgtgtgcctcttgtggcactgaaaaaagtcatgacgcagtggcaggataagatgcatgagtgcaatggctggaacagtctgtactggtgcaatcacgatcaggcgagagctgtgacacgctttggaaacgattcagaagaatacagagaaatctcggcaaaaatgcttggaacatgtcttcatatgatgcagggaactccttacatttatgaaggggaagagcttggaatgaccaatgcagattttacaaagatcgaggagtacaaagacgtagaagcgctggatatctttaaagattttacagaaagaaaaggattttcaaaagaagataccctccatttacttcatttgaagtccagagacaacgccagaactccgatgcagtgggatgcttccgaaaatgccggattctccgaagcacagccatggattcgtgtcaatgctaattataaaagaatcaatacagaaaatgctctggcagacagtgactctgttttctattactatcagaagctgattgccctgcgtcatgaacttccgattattacggatggagtttatgaactgctggatgcagagaatgaaaagatttatgcttacctgagaaaaggagagaaagaaagtctgattgttctttgcaatttcacggatgagacagtggaatacgaggtggatgagtctgtaaaagcagagagaagtaagcttgtaatttccaattataaagatgctcctgaaaagtttgcatcaaagatcacaatgaagccttatggggcttatgtatactatacaaaatgaggtaagaaaaatggtgtaatcccgattatggggttacatctttttttgcaaggattttttgcagttatacctgatttgcaaataaatccgtttcgaggctgagtaagttgctgatttccaaagctatgtcgtttaaattgcaatcaagttctcccaaaaaccattgattaagtggtgatctttttatagattgcttcagccagaagccgatgccccagagcatccagatgctgacggtcggtttcactggcattggcaacagaggcagcatcgagaaaatcagcgtgataccggacagcaatttttttatattcagtggcaaggttctgagagacaagctcagaacctttattaaattccgggtcaaatccaggatcgccgacacccggagcaaggaggatcggtgagatcacgaaaagacgaaaagggtgggaagaacttttctgagctttggtgatgacctgttccagtcccttggcaatcgtgccggcagaggcattgtaacgggtcttgcagtcattggttccgagcatcaggatgagcagatccacaggggcatggctttccaggagaataccgatcgtatccagtccacggcggccttcccgcaattcatcggaaaagacggtagttcttccacagagaccttcttcaataatacggtcattggttccaagctttttctgaagcagaccggtccaacgggtatctgcatcaaagcgtcctgatccgtcagggcgatatccataagtatttgaatctccaaaacataaaatattcataacgtcaactcctttataaacatactaatcatatatgaatagtatattaaaacgaagaaagagaaatgtcaagtgtcatatatgagaactttcagagatccagttgcttcagtgccagtgcaattccatcctgatcattgtctgctgtgataaaaaaggactcttgggtctgagggatcttttacaatccagtcagatcgggtataaagattccatgtcaggtcaaaatcctgtgattcaatatattgaatcacagaagccgcgtcctttgctgtgaagcctttttcataaagaacagaacggttttcgtccaggatcagtcctcctgagaaggctatgatggaacaggtaagtccatagttacttatgatcagttcaatggcagcaggataacgtgcagaggcgaggacaaaagaagttccgttgttgcaggtatggggtatttgcaaaagccgtctgtagtggtaaaataaagattaaggctgaaaataaagatggagtgtagagaatgataaaaaagatcagagcgggggtgctgctcctcttctttctgctgctttctttcgaggcctgtaaagcaggtgatgcggaaaaagaagcaggcacaaaaggctggaaagaagctgcggatgccgcagagaatgaagagcaggtgaaaaagtcctcatccgatacgacctgttatacttttgaggatgtggaaggaaattcttatcaggcagagctgcttgacgaagtggcaaagaacccgtataattttaagaatcttgtgacggacccggaaagcggatataagacttattcagatacgaagaagcatatttcttcaaagctgggtgtggacgtttctgaatttcagggcgaggatatagactggcagcaggtaaaggaaagagggattgattttgtgatcgtacggctgggatatcgtgcctacggagagagtggtgttctggtactggatgatatgtttgaccagaatgtgcagggtgcattgtcagccggcctggaagtaggagtttatttcttttcacaggcaacaactttgtccgagacagtggaagaggcagattttgtactggagcatatcaggcagtatgacatcacagcaccggttgtatttgatacagaagagatcaaaggggatgaggcaagaaccgattccaatacacgggaagatttcacaaattactgtaaggtattttgcgacagtatcaaagcagaggggtatgatgcaatgatctatgccaatatgaaatggatggcatttacgctgaagctggaagaacttgaaggatatgatttctggtatgcggattatcacgaagagccacagtgtccgtatgcatttaaaatgtggcagtacagtgagacgggagaagtacccgggatcacaggacatgttgatttagatttatggtttcaggaggaaaattaaatgaaatggaataaattccggttgaagacaacgacagaagcagaagatatcgtcagcagtatgctggcagatcttgggatcgaaggtgtggagattgaagataagatcccgctgacagaatcagataaggagcagatgttcgttgatatccttccggagattgagccggatgacggagtggcatatctgagtttttatctggaagaagaggcagacaccgaatctgtgctggcgaatgtaaaaaaggaattagaagagatgtctgcttatgtgaacgtcggtgaatgcacgattgaagaatccgagacggaggatgtggactgggtcaataactggaagaagtattttcatcagttctatgtggatgatatcctcatcatcccgtcctgggaggatgtaaagccgtccgatgaggataaaatggtcatccatattgatccgggtacggcatttggaacaggaatgcatgagacaacccagctttgtatccggcagatcagaaagtacgtgacggagaagacgaagattcttgatgtaggatgcggaagtggtattcttggaatgctggcactgaaattcggggcagaacattccgtgggaacggatcttgatccatgtgcgatcgatgcaacctatgaaaatatggagaataacgggatctccagagacaagtacgaagtcatgatcggaaatatcattgatgataaagcagtgcaggacaaggtcggttatgaatgttatgatatcgtggctgccaatatcctggcaccggtactggtagagctgaccccggtgatcgtaaaccagcttaaaccgggtggaatttatattacaagcggaattattgatgataaggaagaaattgtaaaagaggcagtggcaaaggcgggactggaactcattgatgtgacctatcagggtgagtgggtgtgcgtaactgcaagaaaaaggaattaaaagaaattagtaaaaggagaatggaatgcagcatttttttgcggatcggtcctgggttcaggaagataagatccggttggaaggatccgatgtcaatcatatgaagaatgtcctccgtatgaaagaaggcgaagaggtacaggtcagtgacgggactggaaatgcttacctgtgtcagatagaggggtatgaaggtgatcaggctgtgctgaagatccgggagaagacggagaaagatacagaacttccgtcaaagatctggctgttccagggacttcccaaaggggataagatggaactgatcgttcaaaaggcggtagaactgggagtgtacggcattgttccatttgcggcaaagcgttcagttgtccggctggatgagaaaaaggccgggaaaaagcagattcgctggcaggcgatcgcaaagggagctgcggagcagtcaggcagaggtctgattcctgaagtggagaccgtgaagacttatgccgaggcactggagttcgcaaaagggctggatgtgatccttgttccatatgaactggaagaaggcatgaaggcaacgatgagcataatcgaagcgatcagaccgggacagtctgtcggaatcttcattggcccggagggcggctttgaagagcaggagatcgggcaggcacgaaatgcaggagccgttccggtcacacttggaagaaggatactgagaacagaaactgcaggaattacgacactttcaattttgatgtatcatctggagtgtgcagaggttcagtagcattctcagagaaaagaacatattttatatagaaagagaagaaaaggaaagggaaaatggaagcttatttagataattctgccacgacaatggcatatcctgaggtgggagagcttgtatataaagtgatgtgccgggactacggcaatccgtcatccatgcatcgcaagggtgtggatgcagagcattatgtcaaaggagcaaaagaatctttggcaaagcttatgaaagtaaatgcaaaagagatcttttttacttcaggtggaacggagagcgataatcttgcactgatcggatgtgcaagagcaaatagacgggcaggaaatcatctgatcactacgtccatcgagcatcccgccattttaaatacgatgcggtatctggaagaagaggaaggctttcgtgtgacctatctgccggtagactgctgcggacgggtcaagctggatgcattaaaagaagcgttatgcccggagacgatcctggtatcgatcatgtatgtgaataatgaagtgggaacagttcagccggtggaagaggcagcgtcgatcgtgaaagattataatccgtcgatcttattccactcagatgcggtacaggggtttggaaaataccggatctatccgaaacgtcagaaaattgacctgctcagtgtcagcggacataagatccatggaccgaagggaacgggatttttatatattggtgagaaagtgaagatcaggccgattctgttcggtggtggccagcagagggatatccgttccggtacagagaatgtacctggaattgcagggcttagtcttgcggctgagcttgcatacaaagattttgatatcaagactgccctgatgagagaactgaaagaatactttatcagtgagatcggtaagatggaaaatactgtgatccatggagtggcggatgagggaagtgctccgcatatcatcagcctgggtgtagccggggtacggagcgaggttctgctgcatacactggaggacaagggaatctatgtatcgtccggatcagcatgtgcttcaaaccatccggcagtcagcggagtattaaaaggaattggggcagcgagggaatacctggatgcaaccatccgaatcagtatgtcggagtttacaacaaaggaagagattgattatcttttggagacactttataagtgtgttccgatgctgagaagatatacaagacactaagtgtataagaagagaaggagaaggcagatgaaatttcattcatttttgatcaaatacggagagattggaatcaagggaaagaaccgttatatttttgaagatgcactggtgcgtcagatccgttatgccctgcagggagcagacggagaatttctggttcataagtgccatggaagagtttatgtggactgtgagggagaatacgattttgaggaaacggtaggaagcctgaaaaaggtctttggcatcgtgggaatctgtccggttgtacgcgttccggtggctgaactggagcagttaaagaaagatgttgtatcctatgtggatcaggtctatgaggataagaaccttactttcaaagtggaggcaagaagagcaaataagcgttatccggtcaattctatggaaatcaactgtgcagtgggagaagcggtactggaggcattcccggagacaaaggtagatgtgcatgatccggatgtgagactgaatgtggaaatcagggaagaagtttatatctattcaaagattattccgggaccaggagggatgccgatcggtacaaatggaagtgccatgctgcttctgtcaggaggaatcgacagtccggttgccggctatatgattgccaagagaggcgttgagatcgaggcaacttatttccatgcaccaccgtatacgagtgagagagcgaaagaaaaggtagttgaccttgcacgcctggtatctgcctatgcaggaccgatcaagttgcatgttgtcaattttacggatatccagcttgctatttatgaaaaatgcccgcatgatgagctgacgatcattatgcgtcgttatatgatgaaaattgccgagcattttgcaaagaaagacggatgtcttgggctgatcaccggagaaagtatcggtcaggtggcaagtcagacgatgcagagtctgaatgcgaccaatgcggtttgtacgcttccggtttaccgtccgctgatcggatttgacaaaaaggagatcgtggagatttcggagaagatcaacacatatgagacatcaatccagccatttgaggattgctgtacgatctttgtggcaaagcatccggtgacgaaaccgaaccttgaaagaattgagaagtctgaactgaatctgaccgatgtgatcgatgatctgatgaagacggcgattgagacagcagaagtgatccggatccgtcagaatgaagcataaaccgtgagaaacacgctttacaggtttcgctgattatcgcggcagttgccaggcatggagtctggcatgttgcccgcataataaaaagaggaaagtcctctcagggctttcctcttaaatcggcaaatatttggtttatcctgaatgcttatttaatgatataagcatcaagtgctgtaagaatttcatcaacgtttccgtcagcgtggatgttcagatcaatcggcttggaaagatcaagactgaaaattcccatgattgatttggcatctataacatatcttccggatactaaatcgaaatcattgtcatacttggtaatagtattaacgaatgacttaaccttgtcgattgaatttaatgaaatctgtactgtcttcatttcaaatccctccttgaatctgcaatatttgaggtctgttacgacctatgtatattctaagggatgataaagtaaaagtcaaggaacattagaggaaaaaagaggtaataactatgtcaaaaaaagctgcattgcacaaccttggatgcaaggtaaatgcatatgaaactgaggctatgcaggaaatgctggaaaaggccggatatgagattgtcccgtttaaagagggggcagatgtctatgtgatcaacacctgtaccgtgacgaatattgcagaccgaaagtcccgtcagatgctgcaccgggcaaggaaaatgaatccggatgcagtggttgttgcagcgggatgttatgtgcaggcacaggagggaaaagtggattcctgtattgatatcgtgcttggaaataataaaaagaaagatctgatcaggatactggatgaatataggaagtcccgtgcagagagcgggcgggaaaaggagatactgccggatgtggaactggaagatatcgggcatacaaaggagtatgaatccctcaatctgaccagaccgggagatcatacgagagcatacatcaaagtacaggatggatgcaaccagttttgcacgtactgtattattccctatgcaagaggaagagtccgcagccgttccatggaagatgtaacggaagaggtccggacattggcagaaaatggatacaaagaggttgtccttacgggaatccatttaagttcctatggaattgattttgataaagaaagacatctgctggatctgatccgggcggttcatcagatcgaggggatcgagagaatccggcttggttcactggaaccgggaattatcacagaagaatttgcagaagcaatttcaaagttaccaaagatgtgtccacatttccatctctcactgcagagtggctgcaatgcgacattgaagcgtatgaaccggagatatacaagcgaagaatatgcagaacgttgtggtatcctgagaaagtattttgaaaatccggcattgacaaccgatgtgatcgtcggttttccgggagagacggaggaagaatttgaagcttccaggaactttgtggattcgattgatttttatgaaacccatattttcaagtattcgagaagagaagggacaaaggcagcagttatgccggatcaggtaagtgagggaaaaaaatctgcgcggagtgctgaaatgatcgaaatgggtgagcagaagcggagagcttatgaggaaagctttattggaaaagaagttgaagttctggtggaagaggaaatcgaaaggaacggagaaatcttttggacaggacatacaaaagaatatataaaaattgcactacaaagcagggaaaacctgagaaattgtatcgtaaaagttcaaattgaagatgctttacaaattattcattgaatttcagggtgaattatattaaacttgagataaggcatcggtttcagtcaggagaccagtgtgattgcagacttccgggtcaggcagcatccggggtgtgacagacagataaaagcaagacaggaggaagaaaaatgggcgatttaagtaatacgcagttctttcaggtagagccgggaccgcagatttctgcgaaggatattcttgatatcgtatataaggctctgaaggaaaagggatataatccggtgaatcagatcgtagggtatattatgtctggagatccgacttatatcaccagttataacggtgcgagaagccttgtgatgaaggtagagcgtgatgaactggtagaagaattactgaaagcgtatatcgaacataattcttgggaataatcagaatatgaggatcatgggactggattacggcacaaagactgtgggcgttgcgatcagtgacgcactgaagatcaccgcacaggggatcgagacgatacagcggaaagaagagaataagctgcgaaagacttgtgccagaattgaacaattaattaaagagtacgaggtagaaaagatcgtactcggatttcctaagcatatgaataatgatgtcggtgaacgtgctgagaaatctttggaatttaaggcgatgctggagagaaggacgggtctggaagtagttatgtgggacgagcgtctgacgacagtggcagcagagcgtacgttaatagagagcagtgtaagaagggaaaaccgcaagcagtacgttgataagattgcggcggtttttatattgcagggatatttggatttattaagcatgaggaacggagcagatggagaagattaaatttgcgtttggagacggaaatggtgaggacgagtttttcgtccttgagcagacaaagatcaacggagctacatatattcttgtgacagattcggaagaggatgatgcagaatgcctgatcttaaaggagacgggcgtggaagagcagacggataagatgtatgagatcgttgaggatgatacagagcttctggcagtatctaaagtatttgaagaactgctggaagatgtaagtatagagatgtaacagttttttgaagaccgatggaggggaaacggatacagatgggacaggataagacgcaggaattactgaaagagaaattaagaggaaagggtctgaaagtgactcatcagaggctgcaggtcttatctgttcttgaagagaatggcggacgtcatatgacggctgaggatatttatgagctagtgtctgtggacaacccggagatcggccttgcaacggtatacagaaccctgcagcttttactggatatgcagttggtggaccggattgatttcggggatggatgcgtgcggtatgagatcggacatctgttgaacggagatacccggcataaccatcatcatctgatctgtaaaagatgcaataaggtagttccgtttgatgatgatcttctggatgatctggaagagcatatcgaaaaagcgaccggatttcatgtactggatcatgaactgaagttttatggtctgtgcagcaaatgtcagaaaaaggaaaatgaagagaaataaaatgtaaaaagcaataaagaaaaaggtttatggaggtgttttatttttgaaaaaaaagaataatggaaaattgcgtatcataccgcttggcggtctggagcagatcggtatgaacattactgcgttcgagtacgaggacagtattgttgtcgtggactgcggacttgcattcccggaggatgatatgcttggaatcgacctggtcatcccggatgtcacgtatctgaaagataatatttccaaagtgaaaggattcgtgatcacccacggacacgaggatcatatcggagcattgccttatgtgcttaaggagatcaatatcccgatctataccacgaagcttacaatgggaattatcgagaacaaattaaaagagcataatctgctccgcagtacaagaagaaaagtagtccgtcatggacagtctatcaatctcggaaagttcagaatcgaatttatcaagacgaaccacagtattcaggatgcatccgcactggcaatctattccccggcaggagtggttgtccatacaggagactttaaagtggattatacaccggttttcggagatgcgatcgacctgcagcggtttgctgagatcggaaagaaaggggtacttgccctgatgtcagacagtacgaatgcagaacgcaagggatttacccagtctgagcgtaccgttggtatcacctttgaccatatttttgcggagcatcagaatacccgtctgatcattgctacttttgcgtccaatgtagaccgtgtacagcagatcatcaactctgcctataaatacggaagaaaagttgttgttgaaggacggagcatggtgaatatcatttcaacggcttcggagctgggatatctgaatgtccctgagaatacgctgatcgagatcgaccagatgaagaattatccaccggagaagatggtgctgatcacaacaggaagtcagggagaatccatggctgctctgtcacgtatggcggcagacgtgcatcggaaagtgacgatccagccgaatgatacgattattttcagctccaatccgattccgggaaatgaaaagtctgtatcaagagtcatcaatgagctttcagcaaagggagcagaggttatcttccaggatgctcatgtatcagggcatgcatgtcaggaagaactgaagctgatttattcactggtgaagcctaaatatgcgattccggttcatggtgaataccgccatctgaaagcaaatgcaggtgtggcaacctctttgggaatcccgaaagagaatgtctttatcattcagtccggtgatgtactggagttatgtgatgagtcggcaaaagtagtggacaaggtgcatacaggtgctattcttgtagatggattaggtgtcggagatgttggaaatatcgtattgagagacagacagcatcttgcggaagatggaattattatcgttgtcctgacactggaacgaagaacgaaccgtctgcttgcaggaccggatattgtttccagaggatttgtatatgtccgtgagtcagaacagttgatggaagatgcaagaaaggcagtggccgatgcactggataagtgcctgcgaggaaagcatacggactggaataagatcaagctggtgatccgggatgcaatgaatgattatatctggaaaaagacgaagagaagacctatggtgattccgattatcatggatgtggatgtgtagatatgatagtagatgaacgtatcattacattcatcaattctatggatacagagaacagtgaaatactggagcagattgaaaaggaggcacgtgcagattccgttccgatcatccggcgggagatgcagagcttcctcaggacgctccttatgctgaaaaaacctgtgcatatccttgaagtgggaactgccgtaggtttctctgcgttattgatgagtgaatatgcaccggaagagtgcaggattacaacaatagaaaattatgaaaaaaggattcccattgcccgtgaaaatttcaggagagcaggaaaagctgaccggatcactctgatcgagggagatgcggctgaagtgcttacagagttgaccggggagtatgattttatttttatggatgcagcgaaaggccagtatatccactattttccggaagtgatgcggctcctggcaaagggaggctgtcttgtatcagataacgtcatgcaggatggagatattatagaatcaagatttgccgtggaacggaggaacaggacgatccatgcaaggatgcgagagtatctttatgaattgaagcataatgaagagctggttacttcgatcatcccgctgggagacggtgtaacggtaagtataaagaaatagcaggaaggaacaaaaacgatgagcagacatccagaattattgattccggcgagcagcctggaagtgctgaagacagcggttatctttggagcagatgcagtttatatcgggggagaagcatttggattgcgtgcgaaagcaaaaaatttctcgttggaggacatgaaagaaggaatcgcatttgcacatgcacacgatgtgaaagtttatgtgactgccaatattcttgcacataatggagatctcgatggagtccgcacatattttgaagaattaaaggaaatcggaccggatgcattgatcattgcagatccgggagtttttgatattgcgaaagaggtttgtccggaaattgaacgtcatatcagtacgcaggcaaataataccaactatggtacttataatttctggtatcggcagggggcgagccgtgtggtatcggcaagagaattgttgctgcaggaactgaaggaattaagagcaaaaattccggcagacctggagattgagacctttgtccatggggcgatgtgtatttcttattcgggaagatgtcttctgagtaactattttaccggaagagatgcaaaccagggagcatgtacccatccatgccgttggaaatatgcggtagtggaggagacaagaccgggagaatatatgccggtttatgaaaatgagcgtggaacttatattttcaattcaaaagatctgtgcatgatcgaacatataccggagttgattgatgcgggaatcgacagcctgaagatcgagggacgtatgaagacggctctgtatgttgcaacggttgcaagaacttaccgcaaggcactggatgattatcagaaagacccggaattatacagaaaaaatatgccgtggtatctggatcagatatcaaactgtacttatcgtcagtttacgaccggcttcttttttggcaagccggattcggaatctcagatctatgacagtaatacgtacattaaagaatacacttatctggggattgtaggagaagtgaaagatggtctgatccagattgagcagagaaataagttttcagttggcgagaccatcgagatcatgaagccggacggacggaatgttgaagcgaaggtagtgcggatcgtcaaccaggacggggaagaacaggaaaatgcaccacatccgaagcagatcctttttgtggaactcagtgagcaggcggatgtatatgatctgttgagaaggcaggaaaaggtctgaaaagttagaaactgattatgtagctgcagggaaccgccggaggcagttcctgcgggtcagcagaaccagaccctgagtttttctacagcacttttttcaatacgggatacataagaacgggaaatgccaagcagagaggctatttcccgttgcgtgtattcttcaccattatataaaccatatctcatttttaatacaagacgttcacggggagagagttcactctccactttttcatataatttttgaatattttctttcagatacagtttttcgggaacatcagtatcagtagtttcaatgatatcgtaaagacgtatttcattgccgtcccggtccgtgccaatgggttcataaagagaaatttcttttcccccttttttcctggcacgcaggtacatcaggatctcattttcaacacagcgggatgcataggcagcaagccggtttcctttttcaggatcaaaggaaatgaccgctttgatgagtccgatcgtaccgatggagatcagatcttccatttcttcaccaagattctggtattttcttacgatatgtgctacaagcctcagattacgctcaatgagaatgtgctttgcttccagatcaccctcggtgtacttttgaaagtaatacttttcttcgtcaggcgtgaggggattgggaaatgtcttcaaggatacacctcttagcacatttgatatcattgtatgaaaaaggatattatatcgtgcttttccatctgaaaaatgcctgggattcagtaaaaaatttctaaaatccggaaaagaaaaataaactccattgacttttgaaagagagtcctctattctgtcagtacatttccagagcattccgctctggcgatcagatcaggctggttcagccaggtttcattgaaagtgatttcgtaaaaagaacggttttattattcggaaagaggtgcatattgagtttcagtacagtagtatctgctgcaaccgaaggacttgcagtagaatttgtccatgtggaggcagatgtcagcaatggtctgccggtatttcacatggtaggatatcttgcctcggaagtaaaagaggcaggagaacgtgtcagaacagcaattaaaaattcaggatttgattttccggcaaaaaggacggtgatcaatctgtccccggcaacgatgcggaagagaggagcatcgtttgatcttccgattgcagtggcagtactgactgctctcggagaactgtcagggtccaggattcagaacactctgatcattggagaaatgggactggacgggagtgtcagaaaagttcccggaatcctgccgatcgtggcagaggcgaaagaaagagaagtcagaaggtgtattgtgccggaagaaaataaggcggaggcggctttagtcagtggaatgcaggtaatcggggtgaaggacttgaaagaaaccattgagtttctgaaaagcgggagcaagccgcagaaaaagaaagtgcagcagaccgggagtgtgcaggaaagagagacagaggagagttttccagattttggagatctctgtggacagaaaaatgtcagaagggcagcagaaattgcagtggcaggaggtcataatctgctgctgatcggtcctccgggcagtggaaagacaatgacagccggctgtatcgcagggatccttccacctatgagtacggaagaaagtatggaggtaacgaaaatctacagtgttatggggatggtaaatgaaaaacagccgctgatccggaagagaccgttcagaaacgtgcatcatacagcaacaagggcggcactgatcggaggagggatgattccaagacccggggagatcagtctggcacatcagggtgtctgacgatgttgtgaatacactaccgaaggcgaagaaacgcccagtttacgggctttttcggggttttgtctacttgggattgaacggaaaaagtcgaaaatcgaagattattttacattccgaagtacatttttacccccttaaacataaagttttgccaaaaagttcataggggaataaaaccctatggcaaaacggtcttactttttggcgaaactcataaaaggatactcgattggcgaaaggagaaagttgcttatggcatataaggaatatagagaaatgaaagtttatgaacagtctggatatcaatataaaccaacacctacgattgttcttaaaggaaagtggctggaagaattgggatttgtttctggaactccggtggtggttaagtgccaaggtggacagctgacaatcactccagcagacgaagtgggagtgatagaataaagagatgctttatatttggacgagatatgttataatttaaagaaaagaaatgtggtggtcttatggctattttggtaaataaaattaagtgtaaaaagtgtggagatgtaattgaaagcaaatctgttcatgattttaaaaactgtaaatgcggagctgttgcagttgatggtggacgttgctatttgagaagatgtggcagccgggaagattgggaagatttatcagtgacggatgaaacggagtagaaattccaaagggaaattttaatctttcaaagggcaaaaattgcactttgggaagaaaaagaaaaatttgaatttgacagtgaggtgttttatgatattaacaagaaatattgctgaaaaggcattagaagaagctaacgcatccaatcccggtccatggtcagaacatagcagatatgttgcgcttgcctgtcaaaacattgccagtcgttgttctgatatggatgaagatattgcgtatatatacggcattcttcatgatattggcagatatgcaggtgtaagttcagaaaagcatttaattgatggttaccgctattgcacggaacgtggatgggaaaaagcagcacagatttgtatttctcatgcttttatggtaaaggacatcgcctcgtctatcggtgtgtttgatatgccaccagaggataaagagtttatggataggtttgtaagggaagctatatatgacgattacgattatctggtacaactttgtgatgcattggcgttacctacaggattctgtttacttgaaaagcgtttcgtggatgttgctattcgctatggtacacaccccgcaaccatagaccgctggaaagcagtattagggattaaagaacattttgagaaaaagatgggatgttcaatttatgattgtctgcctggtgtaatagagaatagtttccgttaagataacaaaggtgaaactttcagtaatacgttctgttgatatcccaatttgcagaactgtttaagatagaaatacaaaggtggtggatgtgtgaatactaaaatgtacgatgccatatatgactattataaaaagcattatggccagatagaacaaagagaaatatacaaatggaaagcagttgttcattttcagaacacgtgggatatcgaagccgaggattttccgaagatgcttgaaaacgctttaagcaaaacatccaaccttatgtcttctggtagttattttccaagaagaatgattgtctgggctgcagaaaaggaaccggaggaggttaggcttctattcagattattgtatgatttgtccttagatattaaagagcgaatagaaacatttcgttctgggattgatgcaataatagaaaagcacaaagaagggacaattggaaagagctatcaagatcaccgggcggttatggtttatttgaacatgaggtacccggagaaatattatctttataaatataaaatgttcaccaagtttgcagaactaattgattatgctgatttgccaaaagccggagatattgatttggttttcatgtttgaaagtatgtgcgatatgatactgaaacgtgtaatgcaggatgaagaacttttgaatatgtatgaagaaaggcgaaataagtattatgacccagcgtatcatctgttggtacaagatatcgtttattctgcagtatatttcgaagatcctgagtatttagaagaagaggaaaaggagattcctgttaaaaaatttgatttacaggcaaaggtaaatccgatacacctcaaaggcgcacatgtcgattacatacagcaggcaaaaacaaataaagaaattggtgatgccggggaggaatttgtataccaacatgaacgtagtctggtaaagaaatataaactcggaaatcagaaacaggtgcgaagagtagcgaaactggatggagatggcttgggatatgatattctctcttatgacaaatatggaaaagagaaatatattgaggtaaaaacaacatctggaaaagaagatggaagcatatttattacagccaatgaactaaaaatgagtgaggagcatccagaacaatattatttgtatcgtgtatatgattttgaccaagtttccatgaccggaaaaatttcaatacgaaagggatcactaaaggaattgtgcatatcagcacaaacgtataaagtagatttcaaataaaagaagaactgactaattttcgaatatagaagattagtcagcttttatacgttattcttcatcgatgaatagatttaattgcccatcttgcattgcaacggtttcgtcagcttcagaagcagtcggagcagttactgacggtgtttcttctgccggagcattacgttttttaacaggtggttttttagcatacagggtatcccatcttaacgggctgtgtgattttttgttgtaaaagatgaggagagcctctgcatatcccagcgaacctgcacgtctttcctttgcagtacggctgatttcttttacagaatatcgaccgagtttttcaacaaagaggttgtctttcagcgagtcaccataagcattgatgagtcgtgccactccattcatcatatttgaactgaaggacattggcgcaccttcccaagcaccgatacataaccggagaaccctgtcaagggtgtcaaagccgaacttgtcatatatggtttctaaagttgctacagcgcaaataccacctggagaggaattggaggtaatcgtcagattgtaggattcaactaagtcccggatgatcagttgtttatcgtttcctgcttcgatatttgccatgaatacttcgtatggcagtagaggcttgacgtaacgcatctgattggcaaagatatcggcttcatgagaatagatcagatcatcgtaaatcatacaccatacaggtgtctcacgagagccggaaaccaatgctatgatttcgatggtgtgctgtccattaaatacatagttaacaccgtcacgacggcttacttttaccggatttacttggtaaagatcaaagttcgcagctgccttctgcacgtgctttactgaaaggttacgctgatattcttggtttgatacaaggtttcttatggggatcagttcatattggactttgggtacatacttttgataatcgtccattatatagcctcctcgatagttttctgtattgtttcaatagttttctttagaactgcaagctggtaacgcaggcggttcttggcttcgtctgatgccgatggaaaatctgccacggtatttgtccgttcaatggaatttatccagaatggaattgtgtatgtaagactggatatctctgcatccgggtctggtttaggcatattacggattttaggaagcggttctggtttatgcctatgggtggcaggcttttccgctgccgtggagatttttttccattgcagttcgtggcgcatctgcgagtagctgacgtgtgtcagctgttcatcattcagatagctggagagcatggtaagatgctctttggtcagacgcgagagttccacaaggttgttgtgtgatattttcagattcccggttaggattctctctaccaaatctctggatttttctaaaaggatatcaagggcagcagagtattggctgtacttataaacggtgacgtgagaaatgttataatcgtcacctatttttattgctgttttatatttattcattggttcgccctgcttattgagtctgcccgatttctcagaaatatcggtttcttggggattgcgtattccaatcagaacttctgcatcatacatctttccaatgagatattttttatattctggggttaactttggacgctggagctgggtctggcatacccagataagggcatcttcgtggctgtcaaattccagttcgtctgtttgaaatggaatttcccatttccggcagatgttataacgtttatgcccatcaataatagtatcattccagattaggagtggttccttacagccattatcgaatatatccatttccagtttttcatattgtgcatccgaaagcggtggtatcagcagttcaaattctgggtcgatttttaatttatacattccacactttttcataaaatctgactcctttatcaatcgctgtttattggtgtaacatcttccatacggaagcaagctacgctgttttgcctagcaagatgtccatagatgcggtaacatttgttacgcttccaatcgctgtttactttgcataagcggtttataaaggtctgactgtatagttcatagcagtttccatctgtcagcagttccatgtccacacgatgggcaagataatcttctggggcggagcatctcagagcgattaccttggagtgagggttgaccatgagaagaatatattccgggtttccaagcagttccaatgttactttatgaactctaatgcggtttttcttaaggtcgatggagagtattggttggcaggaaagagttttgtccatagtttggttcctcactttctattggcggttgatctgttttcggtttctgtttattttcctgtatgttaaatactgcatatccatcaaatatattgacttggagattacgctgatgttcctcgacaggcacaccgaactgattctgccattcggcaggataagtaggagtgcgtgacattttcggtttctgaccttctttttctgtgcgtacatatatttccggagtcttgagatcaaaaacaaagagtaattcaccaccagagcgtatcagtttaccaagcagtttgtaacgataattggggttccagtccatcagtgagaatactttggcaaagaagatccggcaggtgatggcttttggacctctttttttaccgctcgtacaccagcggaaagaatcctttgcatcttctgtgcagggacgtacagcaagtttcttttcttccggatttactagtatctgtacatattcgatattgggcagtttcttgatgcaggctgtattcatggaaactttgtaattgttaaaggaaaaagagggttcataggtatgggcgaaaaactcgcctcttacaacttggaaaccttcataactgaaagcgtcatcatcaacaatctggatgtctctgcctctcgtattttcagtttcggaaggagaaattccggtaagggttaattggtgttcatcaatcattagtagcctcctgtttcatttctgtaattatttcattgatgtttctatgcaattcctcttcagtagaaacattccattcggattccctatagggtttactttctgtatgtgcatcccacggctgggaatcgtttgttttttcgttttcaatagtatgtgtgtaataatcgctaccgaagttgtctacccattcctgcggatagcccatgactttttccttggctttgacaggcaagtctggttcgtggggaatgatagaagcatttggcagcagcacttctgtttcttttaaattaaaaacaagaatgctctcattattccgctgcctatggacacctacgattttgtatttacagtttttattccactggaacatttcaaaaatcggaggcaggaaggcattgccacttatgcttttggggagtagaattccatctctttttcttgcccattgaacagaaattttatcttgtacggaacaggggcggactgcaagcaggagattatctgggtgaacaagaagttcaatatgcatgcagtctccaaattttcgtacggcagcagtgctgaatacaatatttcgattggagaatgtaacgcagatacgttcttgaacatcaaagaactgggtacgtgcgatttcataacctctcagatcgaatgctcccggctggatagaggcttctgcaggcagttcctccatatccgtttctttatatgcactgaaagatgcctctttataatcctcgactttgaaacctgcccagcgtggatgtatggttacaaatcctttaagaacaccgctgtctatcactttcagttccggtaaaatacttttattcccatatttagaatttgttattttatgctgtaccgctatgaaatcatcacgggagatgattgcctcatggtgattacgttgacggtattggttcctgtcttgacggttcttttttgatttgtgatccaaatagctgggagtccaagtcttacgggcaagtacatcaccacaatgacgctcattctgcagaacagcaagaacagtagtaggtgaccacacataatttccttttttggtgggacgcttcaattccatcagtgtgtctgagatttcctgcgtggaatatccatatagatacatgaagaagattaagcgtacagtttttgcttcttcttcgttgatgactaaatcaccattctcgtcttggtcatatccaagaagtgggggagtaaggaaaataccacgtctgaacctcatttcaatggaggcattcatgatttcgctcttattatgactttcttcttgggcgagagtggaaatgaaagacaggctcatttcactgttgctgtttaaggtgtaaatgttttctgtttcaaaaaatacgccaatgggtggattcatggcttttaaatcacgaatgatcttgatgcagtccacgacatttctggcaaaacgggacacgctttttgtaacgattagatcgatttttccctttttgcaatcatcaatcattcgtataaaagagtctcggtgctgcagagaagtaccggagataccttcgtctgcatatatttcaacaagctgccaattgggtcttctgcttacaacatcttcataatggttcttctgtaattcataagaagaagtctgtctgggatcatcggtagatacccttgcgtagacagcaacacgtttcattttcacatcttcataaaaatcttcttggggcagtgcagggatgacatctaattcatctgcactgacacctttatatcgctcacgaattttggatttctgtgcagccgtactgcttgctctagtttcaaactctctcatgggaactacctcgtaattatttgatacgattattatattttttatggaaaaaatgaaaatagaccagagggacacctatatccctgtggtctatttccaacgtaaaaattatgtggtttatttactttttgtggagtcatccgtgctgcagagcatccatttgttattacggagaatttcctttgtagcttggatgatttcatacattaaccgtttttccggcgaagtacaatcagccataacaagatcgatatctgtctggtattccgtaggattgttcagctggttcccgttaagaagctcatcaactgtgataccaagggcatctgcaatacgaactaaggactcaagactagccttcttctgtgcggtttctatatgactgatataggaaatggataggtctgtcatttccgcaagctgtgcctgcgtaacacgaagttgttttctgatttcctttacacgtcttcctatcaacataaaatcaacatacacctgtttcacctcctctctgctggcaggcagcttgagggtgtaaaacagtcggcccgccattgatgacgcaccattggtgtgcttttagttgattaaaatagtcaactaaattggagtataccataagagcatatcgagctaaatcgacatgtatttgtcgttaggatagagattttgtcgatgacttttgattgaatgaagtgtggcggagtggtaacatttatgcatggatatccacgaaatttaacttacaggaggaaatagcggtgcatatgaaagaacagaaagaagaaatgttgatgactttgttagagcagaccggaaatgctctgcggaagttgaaagcggagatacggcaggtgtgttcaacgaatgaatatgtaaagagttcgacaatcatagatttgtgtgataagattgaatataagcaaagggaatttgcaagactggacgatatgctaaccgaactggaaaatgctttttaggtccatatttttttaatcaaatagtcaaataaattggagtagtttactaaagtaatatcagtctaataaaacttctggtaagagggtaaaataaagttactaatatcagaagagaggtgtatattacttgtgtccagaagagtatattgcgatgcgtataaaagagttgtgtgaacagcgtggtatgacaaagtatcgtctgtcgcagaaaacaggaatatcgcagactgcattatcaaatatgattgcacaaaaacacgctccaaccatttcaacgttacagaagatatgcgatgcatttggaataactctggcacagtttttcgtaagagatgcatcgagaaataatttgactgatttgcagaaagaaatattagatacttgggatgaattggacgaaaaagaacaggaaatcatgatttcatttgttcgtagtcttaaaagaaagtagaacagttcgaaagtgtaagagcttcggactgttcttttttatgaaaaggggaatgttatgggacggaaatttgttgtattattagtggcaataatgctatgtctttcgggatgtgcgaatgcagaaggagctacgatcgaagaggaaaaagattacagtgtgcattttacgtcagagatttctgaagaggaatgctgtatttgcggagagaatgaccgcagtatgatggggtattatagaaaatctggcatgattggcttggtttgtttaaatacaatgaatatcagcagtttggatgtaagaccatattcaaatgacggtacagaaataattgataatagttctggaactatgctttcatcacatggagagggtgagtgcagtttctatatttctggtatgccgggaagaggcatattggaagcagaggtaaatttcggagaggaaagcgcaccggattttaaaaagatcagtgaatttttgtgtcagaactgtctgaacaaagtggcagtgatgtacgaagaggaaatggactggagtgatggcgaaggtagattcccggaagtatgccttgtggattttgcaactaatgaattatatacgttgggtgaacatcgcttgggatattggattcgtgacttttgggttcatatagaccacaaagaggatcagtcagatatcatggtgatttatgcaccggaagataagatggaaggttataattatgctagtgaagacatcgagtaaaagatgcagaacggatgatttgaaatggcttttggatgaaattggagttaaggatatttcggaagtccagggattaagtgtatcagagttcatagagaaatactcgaagaagcatttcagcaatatatgtctagacaggttgctggaagtgggatatgtgtatgtgccggaaggagagaagctggttgcagagcttccgatcacgacccgattgaaaaatattttattacgaaatgatgtgtacatattgtctgatattgtcaagtatcctagagaagagattatgaagttccgaaatttgggagaaggaaccatgaaggaactagaagatatctgcgaacaggaaggcgtccgattcatttctttacatgagattgaagaccgtatgctgggtatgaaattcagcgataggcagctgataaaaatgttccatttgaatattcttcatccggaggactttttgaatgtaacagatgaagaggtaaaataccttatacagctggataaaggaatgctgaagaaaatagagaagatgcagaaactctgtaaaaaataatttttaatgctgctatttttgcattgcactgtatgctataatatttacagtatgcgtggcaaggaggaaacacaatgactgacgctgaacaaagagaggcagcacgtaggtttataaatgcttggcgtggaaaaggatatgaaaagggagatacgcaacgtttctggatgtcattattggcagacgtttttggtgtagacaacgttgcagaaaaaatagaatttgaaaaagaagttatcatcgatagacaaacaaaattcatcgatggctatattgcgtctacgaaggttctgatcgaacagaagagtttgggaaaagatttaaacaagccaattccacagtctggtggaaagatgttgactccatttgaacaggcaaagaattatgcgaataacatggctttcgatgaagcacctcggtggattattacctgtaactttagtgagtttcagatttacgatatgaataagccgggagcagaaccggaggttgtgaaattagaaaatctgcaggctgaagcataccgtctgaagttcataatggatgagagcaacaagaatatctctaaagagatggaagtatccattcaagccggagatattgtaggcgttttatatgacgagttattaaagcagtataaagacccgacaaacgatgagagtcttaggagtcttaatgctttgtgtgtacggcttgtattctgtctttatgcagaagatgcagggattttcggaagacatggaatgttccacgattacttaaaacgcttcgaagtaagggatttgcgtagagggttgatcgatctctttagagttctggatacaaaagtggctgaccgagatccatacatggatgatgatttggcagaatttccatatgtcaatgggggattattctctgatgaaaatattgaaattccacagctgacagaaaagattcgagaattgatccttgcaaaagcaagtgagaattttgactggagtgaaatcagccctactatctttggtgctgtatttgaaagtacattgaatccggaaacaaggcgtgccggaggaatgcattatacttcgatagaaaatatacataaagtaattgatcctttgttcttggatgatttgagggctgaattggatgctattaaaaaaatcacggttgcaaaaacaagaggaacaaaactgactgctttccaagaaaagctggcaaacttgcgttggcttgatcctgcctgtggttcgggaaacttcttgacagaaagttatatttctatccgtaggttggaaaatgaagttctgaaagcgaaaattgaagtggaaaagggacagattgccgggcagattatgttcggtgattttgaatcaatcaatccgatcaaagtatccattggtcagttctacggtattgaaataaatgatttcgctgtaacggttgcaaagacagcactttggattgcagagtctcagatgatgaaagagacagaagatgttgttcatatgagtttggattttcttccgttaaaatcatatgccaatattgtggaaggcaacgctttgaggttagattggaatgatgtgattcatagagataatttggattacatcatgggaaatcctccatttgtaggtttttcattccagagcaaagagcaaaaagaggacatgctttcggtttatgttgatgaaaaaggaaaaccttataaaactgcaggaaaaatagattacgtcgcaggatggtattttaaggcctctgagtttattttcgggacaaaaatcaaggttgcatttgtatcaaccaattctattacacagggagaacaagttgcaaatgtatggaaacccctatatgaacgatttgatatccatatcaattttgcatatagaacatttatttgggatagtgaagcaaatatgaaggcgcatgttcactgtgtaattattgggttcagtggacaaaaaacggaaaataatattttgtttgagaatagcggaaggaaagttgtaaaaaatatcaatgcatacctacttgattcagaagatatttttattgaaagtcgtaaggaagcattatgtagtgtgccggaaatatcgaagggttttcaggcaactgataatggctatttgattttaaacgaagaagaaaaagaagaattattagccaaagagcctgctgctgaaaaatggattagaccgtactctatgggagtagaatttataagaaatattccgagatactgcttatggttggtggatataaaaccaaatgagttacaaaaactaccgttagtaaaaaaacgtgtttcagattgcaaagagtggagagaaaatgcaacacgaacaggtgatgcttataaattaaaagatgttcctcatcttttccgtccatgcaaacagtttaaagatgttccatatattgcggtaccattagtttcatcagagaacagaaggtatattcctatgggcttcattaacaatggtatgattccgggtaacaatttgtttagcatttttaatgccgaattatatcattttggaattctggattcgaatgttcatatggcttggatgagagcagtatgcggacgtttgaaaagtgattatcgatattcttctggagtagtgtataataattttccatggcctgatgttactgaagaacagaaagcgaaaatagaaaaaactgcacaaggaattcttgatgcgagagctttatatccagaaagttctttggctgatttatatgatcctataacaatgccagttgaacttcgcaaggcacatattgcaaacgacaaagcagttatgcaggcatatggttttaatattaaagagacctcagaagcagattgtgttgctgccctaatggaactttatcagaaaatggtagaaaaataatttgaagattatgatccgaggatttccttggatcattttcttttaataaaacaagtatgaaattgacaatcgaactaatgttcgatataatataagcaggttcgctaccaatgaaggacatttgttaaacagaccaatcagtatttatcccggtattggaggtgtggtttacgatggaacttgaagaatgcatcaaggatgcacttgaagaatcaatgcaggcatatatacattcagaaaaataccaagaacagaagcagagcgttaatgatatggtagcagattttcgtgatggcttaagcgagagccaggttcggaaattcaatgctatattagatgcaatgacggatcagaattcaatgtttgcttctgaagcatatatgcatggtgttgtagaaggaattgctttacacggcaaggtaataagtgaataagaaaaggacggactggctttgatttccctttgagctggtttttctttttggtgagaggatcgtggtagaatggaagaaaattataaagttggagatacggtatacatcatagagagtaatcggattattcgtaaatgcactgttggacgtgtatcgggaggaatatatttgattcgatttgaagaaggcggagcgatacaagtaaaaaaacatagattatattgcagcagggaagcagcagaagcgagtctgcctcagacacagaaaccaagacgtttaactcaatatgactatatgcattaaaatagcccggttgattttcagccgggcaagtgttttttattcagttttttatagcgtcttctgtctcagtgcgataccgtttacaacacctgctacatatgcttttgatgcgaatgtgccatcgctagtattaatggcatcgattaatttgttaaatttgttctgctgctctggattaagactggagcggaattctgaaagcatattgttgatttctgttctttctgttttgtactcttcggattctgtataatttttcatggcatcatcaatggagtccatgatacattctgctaattccatgttgttacctcctgctggaataagttttatactgttgtagttgcaatgtgtataaaattattgtcagcactgtcggcatcggtactgcgatcctgagtcctcagtaggtaaatgttccggattctctgcgagaaccgacaaaatactgaggtgacaggtttgacgcatgaaaagaggaccgctgtcgaaatatatgcgtgcaggggacagcttattgatttctcctttctatagttttctttgtcgaacaagcgcataagccaatgccatgcggaatgaactattgaataaaatgttctctggatactgccataaagttcctcaagacattcatccaccagtttgctgacagcagcattaatggcttctacgattttatgaattgagaaggtaacctcctcattatttctttttacgattctaattgtctcttccatacgtttttcacctcgctttcttgactcggattttagtgtaaatatgtataacacactatatcttgtggttaatgggattatatcatacaagatatagaattacaagcacctttaatgtaaaaaggacttatgacggttcccgatgaatgggaactctcatcagtcctttttgctatgctgccaagaataatcgcagcattcttctttcgtaagaggcatagcaccgtggaccgtatttcatccatttcatgtagtattcgtatgaatactcggatgcttcagccgatacgcaaaatatgtttgcaatatcagaagcatcactgcaatgcgtaatggcgattaacggagggggagcaatcgcatattttgcaaaaaaatttgcttctgcttcctcggtggcactattgctgtcatcgggattgtcgtgatgaccaagataaatatgaccaatctcgtggaagattgtccagcgcattcgctcgtactgagcgtagtcgttataatagattacatattgattcattccagtagcaggatttatttccactctggaaaagccgtctgggtcaatacagagggcattcatatattcttccggagtaagggaagagtatggtttcagaacgtaataaagtttgttcgcgatatcgaagcagtcaatggggtaactacttagttcgcactcttcaaacataaaagaaacttcctgtttgatatcttcgcacctgttgtctgtcagtattctcaagtttaatcctttctagttttctgactcaaaaagggcgttaacgagatcggctttctgcttctgtgtccaattctttgcattccgagcaatcgcacgctgagtacgataatactcaagttcagagtcttcttcagcttcctgaccaagtagataatcggaagtggtgtgaagtgcaagagctatattagcgatgattggtcctttcggagtacggtcacctttaatatatcttgacatggaaacttcagttacaccgaccttttctgcaagctctcgttgagttaaaccatgtttttgtaataaatcagaaatcctttctcctaatatcgtatttgtcataattggtatcctctttctaatatagatttgcatatgctctgcatggcactttttgctctgcgtctttagcattttgcagtgtttggcttacttgattattttataagggatctttgcttcagtatcttttcgtcttatagtttccaagcgatgatacatatattcgaccgtcccttgaggttttcgtatttcagctccaactggcttgctttcttgacaggctttttagttcctgcactacagcattcatgcaaacgttcttttgcattcattcgtagtattaattgtaaaaaaaataaaaattcatggtgatttctgatttaccaaaagtataacagaacttaccatttgtgtcaatgggaaaataaaaatggaaagtttttcaagtgcgaaaaagtccgaaaaataaggaaaaatcgagtttttgagtgttggaaatgtaaaacgaatggaaagttgcgtgttgacaacttaccaaatgtttaatataatttcctcagacttaaacgaaaggagagaaaacgcatgaacgtaagaatgctgaaggcgaagagagttgagaaaaatcttcgtcagaaggatctggcatctgccttgggaattaccgaaaaggcaatgtgccataaggaatgcagttctgaaaataagttcaaagcggaggagatgttaacccttgtcaagcagctggacttatcatttgcagagttcgatgcaattttttttaatcacgaacttaccaaatgtttaagaagaactcaaaaactttccaaaaatggagctggataaatgaatcggattaaaaatacagaagggaatgaaaacatctctcgacctggcagaagagtatcgatgcaatcatcccatcaaaatcagtttaccacaactgatatgaaaagaaaacgattatttatccgatataacgagaccaccacggccatgtgagccgaatgtagaaagaaggtattttttatgaagacagtttttatttgttcaccgtttagaggaaacgaagaagagaacgctgagaaagcaaagttctatgcacgtattgcgattggcacaggagccgttccgattgtaccgcatctttactttccaatgttccttgatgaaaagaagccagccgagagaatgcagggcattgaaatgggactggaacttatggattgttgcgatgaggtctgggtcttcggattcaacatcacatctggtatgcagttcgaattagatcatgcgagagacacgaaggttccggttcgtctgtatgacaaggatatgaaccgcatcaatcttagaacgctccgtattgatgacagagcgacatcggaatatatggcatccattaaaggcttaaaacttttgaaatagaagaaaggggtacgaacatgagcgaagcatatttattggtagcacagggctacgagatggtagcagcagggttgcgtcagttagcagaagctggtggaaagatgccggaggttccggttccaacagaaaaagcggaaacatcacctgctcctaaaaaagaagaaaaagtaatcacacaggatgaggttcgtctggttctggcagagaaatccagagccggaaagacacaggaagtaaagatgcttctgaaggaatgtggggcagacaagctctcagcagtaccggaagaaaagtatccagaacttctgaagaaagcgggtgcactctaatgggcgcacatgcaagattctctccatcctccggcagcagatatctgaactgtcctccggcacttttgctggaggaacagtttgaagatgaacagtctccgtatgctgcagaaggcagtgccggacacagaatggcagagtatctgattaacaaacatttaaaaagaagagataagcgtccggtgtctgattactattcggacgagcttctggaagcagtcgatgattatgtatcatacgtcatcgggcagattgaggaagcaaaacgtatctgcagttctccggtgtttgcagtggagcagagagtcgatcttcgctggcacgtgcaggactgttttggaacagcggatatggtgattatcactgacaagaaaatacagattattgatctgaagctgggaaagggtgtcatggtcgatgcggaagaaaatgttcagctgatgatctacggactcggcgttcttgatatggcagatatgctgttcgacatcgaaaccgtagaacttaccatcgaacagccaagactggaacatttctcaacgtgggaaatctccgcagaggagttgcgaacatggggaagagaagttctggaaccaagagcaaagatggctctttccggggaaggggaatttaaggctggtgatcactgccgattctgcaaagccagattccagtgcagagctagagccgaggagttcctcaagctggcacagatggaattcaaagaaccagaccttctgaccgatgaagagatggcagaggttctttccaaagccgatgatcttaagaagtgggcggaggaagtgtacgcatacgctcagaatgaagcggttgttcatcataaggaatggccgggattcaaattggtgatgggtcgcagcaacagaaaatatacggatgaagaggaagtggcagaagctgcaaagaaagccgggtacacggatatcttcaaatctagtctcatcgggatcaccgaaatggagcgactgatgggaaagaaaaaattcaaagagattctcggtgcctatgtgtataagccggatggcaaagtgacactggtaccagactcagataaaagaaaagcagtaaatgtatcaaccgcagaagcggactttaaacaggaggactaaatatatgagtacaacaatgaacagcacaaaagtaattattccatgcagattttcttacgcacacattttcgaaccgaattctgtgaacggttctgatccgaaatattctgtgagtcttattatcgacaaacaggataaggataccattgcaaaaattaaaaaggcaatcgaactggcgaaggaagatggcaaaggcaaatggggcggtaagattcctgccaatcttaaaacacctcttcgtgatggcgatatcgacagaccggatgatgaagcatacgcaggaagctacttcgtgaatgcaaacagcagacaggctccacaggtcgttgacagacaggtacagcctatcatcgaccagagtgaagtttattccggctgctacggaagagtatctgttacgttctatgcttacaattccaacggaaataagggtgttgcagcaggtcttggaaatgtacagaaacttcgtgatggtgatccattaggttccagagcaaatgcgagagatgaattcgatgcagtagatgcagatgatgatttcctttcctaagtaatcacggggtggggagcttctccgcccctacataaaggagttgaagttttatgaaagattggaaagacatagagggaatggaaggcagataccagataagcagtgatgggagtatccgtgttctgccacatttcgtcagaggaagaaaagtgccgatgaaaattctggatttgaaatatcaggagatagtagcgataaagaagcgactggtgcagggggaacatccatactgcattgcagaagatatgggtgtgtctcgtaaggtgatcagccgaattaagagtgggaggtcatacggatggataaacagttagcgattgacattgaaacgtattctgatgtggacctcatcaactgtggagtctacaaatacacggactccgacaactttgaaattctgctgtttgcatactccgtggatgatgaagaaacgaagattgtagatttggcatccggggaggagctgccggaagaaattatggaaatgctccttgatgattctgtaataaaaacagcgttcaatgccaactttgagcgtacctgcttatccagacatcttggcgtgaagctgaaaccggaagcatggagatgtacagcggtgcaggctgcgatgcttgctctgcctctttcactggaagctgtcggtgtggttttgggactggataagcagaagatgtctgagggaaaagaattgattcgttatttctgcactccatgtaaaccgaccaaaagtaatggtggtcgaaccagaaatcttccggaggatgcaccggagaaatgggaactattcaaaacttactgcatccgggacgtagatgtagaaaagcagatacgaaagaagctgtggaaatatccgataccggaaaaggaacaacagctgtactgcttggatcagcgcatcaatgaccgaggcattatggtggatcgaaatcttgtaaatcacgccattgcgtgtgatttgctttataaggaaaccgctaccaagagagcctatgaactttcggaactggaaaatccgaacagcgtatcacagcttaaagggtggctgacagaaaaaggtattgaagtagattctcttgccaaagccacagtggaggaactggtggataagacagaaggggatgtgcaggagatgttaaaactccgtctggcgatgtcgaaaacttctgtcaaaaagtatgaagctatcgaccgctccgtctgcagggaaagcagagtacatggactgcttcaattcttcggggcaaaccgcaccgggcggtgggcaggaaggctagttcagattcacaacctgccacagaaccatatttctgatttggaattggcaagaggtctggtggcggatggcagatacgatgacgtggaaatgttgtacgaaagtacacctaacgttctctcggaactaatccgcactgcttttgtagcaaaaccgggaagccgatttatcatcagcgacttctcagccattgaagccagagtgctggcatggcttgccggggaacagtggcgaattgaggtgttccagacacacgggaagatttatgaagcgtcagcatcagcgatgttccatgtgccgattgaagaaattactaaaacctcaccgcttcgtcagaaaggtaagatcagtgaacttgcactgggctacggtggttcggtcggtgcgatgactgcaatgggtgcattgaagatgggactttcggaagaggagcttccatcccttgtaactacatggagaaatgctaatccacacattacacagttctggtgggcggtggatgaagctgcagtcaaagcagtccgggataagaagccatccagagtggggagagtggcatttgaatattccagcggtatcctgtttgtcacgctgccatcgggcaggaaactctcttatgtaaaaccgaagatgggagtcaacaaatttggcagagagggtatcacttatgagggtattggggagtccaagaagtggatgcgactggaaacttacggtccgaagctggtggaaaatatcgtgcaggcagcaagcagggatatccttgcagaagccatgcttcgtttggagaaagagggattcgatattgtatgccatgtacacgatgaagtagttctggaagtaccggagggagtttcgtccgtagaggaaataaatcaaatcatggcagtgaacccggaatggacggatggactgccactgagtgcagcagggtttgaaagcccattttacaaaaaagattaggaggacacagcatgggaacaaaatacaattcggaagggtatcgtgacccgaccgcacacttggggattggtctggcagagccggagcagacccgtcagatcgtaagactggcatatcgaaacgggagaatggaactgtatgtgaaagagttctttccctgcacgatagcagtcggaagaaagatattcccgttaatcaagaaatttgccgggaagaaagacattgataatttacgaatgttcttggagatggaggtttccgagcatagggaaaaatatatggaatttgccagacgcagagcattggagccggaaggttcgaagcagttccatttttacaatgccagaagccgggaagaacaggttctgtataaaagagccaagagcaatctggaaatgttaaacagcaaagggggcagaccaaatgaagatcgcagtatcaacgggtaattcccgaatggaaaagaagtggaatttaaaagagatggaactttcggagttccgtgaccgtatctcacagactatccgtacatcggaaacgatggagcagtaccgcaagatgtcaaaggcacagcaggatgatgtgaaagatgtaggtggttatgttcttgggagactcaaaggtggcagacgaaagaaggactgtgtactttcccgttctgcactgacgctggatatggactatgcacatgccgatgtggcggatcagattgaaatgttccagacattcggatgtttcatttactccactcataagcacacaaaagagaaaccgagacttcgactcattgttccgctttccagagaagtgacaccggatgagtatatggcagtcagccgtaaggtggcagaagaaatcggaatggagttattcgatgataccacctacgaaccgagccgactgatgtactggcctagtacctctgcagatggagaatttttcttccatgagattgcaggcgaaccgctgaatccggatgacgtgctttctaaatacaaagattggaaagatgtatctgcatggccggtatccaacagacaacattccattgtgcagaaggatatcaaaaagcaggaagatccgcttcagaagcgtggtgttattggagcattcaatcgtacctttacaattacacaggcaatcgacacttttatttctgatgtgtatcagccaagctccatgcccggtcgttacgattatgttccggcggactctgcagcaggtgttgtgatttacgatgatgtatttgcatatagccatcatgccacagacccagcttgcggaaagctgatgaatgcttttgatgtggtccgcattcacaagttcggtcatctggatgcgaaggcttctgaagatacggactctacgaaacttccttcctacaaagctatgcaggaatttgcttctcagaatgaacaggtacgcatcacgcttggaaaggaacgtgaggagtcagccagaatggattttgcagaagaggactggaagaaacagctggagtataaccgacagggaattctcatcaataatctgaagaacctgcttctcattctgaataacgatgaaaatttaaaagggatcgtgttcaatcagctgtccgatgatatggaaatcaaaggggaagtgccttggagccacccatccaagttctggagagatgcggacgatgcacagctgatttcctatatcgaccttacctatggaaacttctcagcgagaaattatgacatcgcagtatcgaaggtaacggatgaccgttcctatcatccgatcaaagagttcctagcatctctcccggaatgggatgaaatcccaagagtagacacactgcttgttgatttcctcggtgcagtagataacgaatacgttcgtgcagttaccagaaaaaccttagtagctgcgatcgccagagttatgactccgggatgtaagttcgataccatgctggtgttatccggtccgcagggaaaaggaaaatccacactcattgcaaagctctgtggggactggttcaatgactcgcttctgttatcagacaccaaggataagactgctgccgagaagctgcaggggtattggattctggaaatcggggagttggcaggtctcaagaaaacggatatcgaaacgctccgtgggttcctgtcccgacagaatgacatttaccgtgctgctttcgggagaagagcgactcctcatccgagacagtgtgtattcatcggaacgaccaatgcggatacttatcttcgtgacattacaggtaacagacgtttctggcctgtgaaggttacgggtggaacgggcagaggctcttgggaacttacccgtgaggaagtggagatgatttgggcagaagcacttcactattacaaagaaggcgaaaccctccatcttccaaaagaactggaaccgattgcggtacaggaacagaaggaagcgatggagcaggacgaaagggaaggtacgattcgtgactaccttgagatgctcctgccggagaactgggagtctatgactctttatgagagaaggaacttcatcaatggatcagaatttgaaggaagccgtaaggtcggagtaaagaagcgtacccgtgtctgcaatatggaaatctggtgtgagtgcttcggaaaagaacgtggcaatctcaaacgacaggatgccaatgaaatcgcagccattatgagtaacatcgaaggctggaagcgaccggaaggtaagatgcgcttctccatttacggagtagtcaaagggtatgttagagaagaattgacggaaacagaatagggaaacaatcggcaatggtgatgccgacaacgctagttgccattgccgatgaggtatccgaaaacgggatatgacggcaaacaggaaaaaggctggaaccgcaagggaagcagggtggcttgtttctatgttgcctataaatatctattaattagaaatctataaatatagccccgtagcacacgtgaatatgcgtattgcacgtatacgcgcgtaagagggaaattgggaaacggaggtttcaatgagttatagcgaaaagtacgtggaacaaaaattagtaaccgaggcaaaaaagatgggaggcttggcggtaaagttcgtgtctcccggtttagatggggtgccggacagattgatactgttccccggaggcaaggtggcatttgcagaactgaaggctccgggcaagaagctccgccccctacaggaaaaaagaaagcgaacactggaagggttaggcttccgggtttatgtgatagataacgtagaaaagattggagggattctacatgaaatacaaaccgcatgattaccagaactatgcttctgaattcattataaaaaatccatactgcggactgatcctcgacatgggtcttggaaaaacggtcattaccttatctgcactctgggagttaatccttgattattttacagtcggacgagtgcttgtgatcgcaccgaagcgtgtagcagaagatacatggagccgggaatttctaaaatgggatcatctggcaggtcttaaaatttcaaaggttctggggacaaagcagcagagggaagatgcactaaaagcagaagcagacattttcattattaatcgtgaaaatgtggcatggcttgtggaaaaccataagtggaacttcgatactgtggtgattgatgagctttcgtcctttaaatccaataaggcacaaagattcaaagcacttaagaaagtacgtccacagattcagagattgattgggttgactggtacgcctgcaccgaacacacttatcgacctctggcctcagatgtatttgattgatatggggcagagacttggtcgttacattacaggataccgtgagcgattctttgtaccagacaagcgaaataaagaaatcatttattcttacaagttaagaccgggagccgaacagaaaatatacggtttgatttcagatatttgtatttccatgaaggcttgcgattatctgcagatgccggaacgtatcgatacccgagtggaagttgcaatgtcggatagggagcagaagtattatgaccagttagaaggtgatatggttttgaatgttggagaggatgaactggatgcagtgaatgcagctgcactctctaataagttatcccagatggcaaacggcgcagtctacgatgagaataaaaaagtaatcccaatccatgagaggaaactggatgcattggaagatttgatagaagcatccaatgggaaaccagttcttgtggcatattggttcaaacatgataaagacagaataaaacagagatttgatgtaagagaaattgatacagcgaaggacattgctgattggaatgaagggaagattcctgtagcactgattcatcctgcatctgctggacacggattaaatctacaggaaggtggttcaaatattatttggttcggtcttacatggtctttggaattgtaccagcagttgaatgcaagactctggagacagggacagagaaatactgtggtggtacagcacattattacaaaaggaacagttgatgaagatgttataaaagcattggaaaaaaaggatgccggacagtcggctcttatcaatgcggttcgtgcaagaattggaggcggtgggcatgagagcagaagaagtgcttgataaatatcagaaattgaaaaaagaacatgcagtattgaaattccagctttccagatttaaagggataaccccagatgacattattgagtcgatgaccttctcccacgctgatggtgagagggtacagaccagcggtgtcagtgataagactggaaagatagcggtgaattataaaaagattgcagacagggaaaatgaagagtggctttcttatctgatttcccgatttgagtacgtggaagctgaaattgagttcttcgaatacacactaaaaggtctggcaaatggcgtcggagaaattatgtgggatatggtggtcgagtgtatgagctggaatactattgaagaaaaatatcatatcagtcatgccacgttgggaagatatagaaaaatggcaattaaagaactggatgcgatttatgaattgcgtgataagcagacggaaatatatatgcttggataggaggacgtgtatgtgtaaacgtggagatatatactatgctgattttggagtaaagaatggtttctgtgaacagggtggaattcgtccggcagtggttgtcagcaataataaagcaaatgcgaactcccctgtgattacagtagttccgctgacaacaaaaatctggaaaaaaccgtaccttccaacacacgtgcagattccatattctgcaacaacaggattacatagaaagagtatggcattggcagaacaggtggagacgattgataaaaagaagctgaccgagaagattggggaaatatcagatacccttcttatggatcaaatcacaattgcccttcagatacagataggggcatatgaagagtataattgaggcagttgggaaaccagctgtcttttcttttttttgaagaaggggtataatgatagttggatagaaaaattggaattttgatacctacaattctttaacacctaactggtattataaagtgttacgataaaatccgcaatgccttgattttactacagttttggcaagtgagctttcccttagactttcccttatgttatatccttttcccttgtgttacgacacctcataagggcaaaaacaagggaagcaaaatccggtaacagctaataacattatataaatcacataatcggctggaactggtcaagatgcttctacaactgaaacagataagagaaaggactttgcaatatgaatatcgttcatgcagaatataataaatatcacaacatcatagacatcaattattacaatggctacatacttcggattgactgtggcaaggcagaagatggattgattactactcctaactctcaacgaatgttggatgcactggcgattgacaatccactagaatatgcccgtttgtatcttgattcagaaatgcaagattgggtgaatgcgatgaatatggaatggtatagcacttgataaaagaacataaaaatgagaagaaatctgtcaaaagtatttctataaaatacgatatttctttagcccttccataaataatgaaatagagccgataactcacaatcgaaataacgagtgattcatcggctctatattttatggttatggatatcatgagtatcgctttatatgcaattgctattttgttaattcccaatatttatgacccataaagaagattgttaattcgttttgatctacttctatctcaaaattcacgctattatctctctgttccacaaaaatcatatttgaggaagatatgctatataatgcattgccacaggtaatacccaattcgggcatatctttgtttacaacaagtcctccattttcttgaaaggtaaacacttcctctgcatttgcattcttccatgtaccaataatattttttttattctgaatgtgctttatttttccaacacatacaacgataagtatagctacacttacaattaaagcaatgcctacaacactctttgccaatttctttttattcaatttctattatctccatttttagtttctttaagattgaatgattccatattgcttaattcagtatctccatgaatttctaacattgatacgcttctcacaggaaatagaataggagagattcattcataaataattaaatcattcatacttacctgaatttgtaatgtttttccatattttctcataattatctactatagttttttctgaggtcaaaaatgcaaacatagatatacttgaatagagagtttccgccgaatcaaaaaccacacaactttcatcatgagttagatttctctttgaatatatttccgatacaggcataaatgaattttcttcctctttggtgtatttatacccatcaatacatcctagattttttaaaaatattaaataagtatcttcggtcttcagatattgccatccgttagtgtaaaattcttcacctctaacaaatgatacaggttctataatgtaaatacagtcacctactgaaagattagcagaattatccttatagatttcctctatttttaccattgtttttgttgatcgtaaactcatttcacgagaatttgttacagttatacgagctattaaagaagaatctttttccatatcatccaatgagtaattactttcattgttaaagtaagaagttttctgccctcctgtatagaaaatttccatagctgtattttctgataaagcaatatcaggatcatgaacccctgtagttgtttttatcccagtctttccatagaataaggctgtcaccatacaaatgattacaacacagatagttaatacaaatttcttcattacatcaactccttaattttaccaaattccatgcatatcttctcatccgctaatatttcaatatcttctttattatggcttgtcagtatagtaatggtatcattctttttttcttccaatatacgttcacgaaataaatcaatgctatgctgatccaatgcgttagttggctcatccaaaagcaaaatttttggatgttccatcagtgcttgacaaagagctagtttttgacgcattcctaatgaatatttatttacttttttctttgatttgggatcaagaccaaagtatatcattatttcatatatttcttcatctgatacaattccttttatattggaaagcattttcaaattttcaaatcctgaatacatactccaaaaagaaatattttcaataacagctcctaaatctggtaaaacatccatatctttatgtaatgccttgtgattatattttatgtatcctttgtctgtatttataaaacctgcaatggctctgagtagcattgttttacctgaaccatttttaccatatattccatatattttaccagattcaaatgtataactgatatcatcaagcactttttcacctttaattgactttgaaatagattttacatataaattcatggatatcattcacctcacaatatttgttttttttcgcaaagaaatttacctatccacaccaaaacagcggatgatataactgaaatgagacagcttgacttaaaattcaataaatctatattgcttgtagtccattcgtaattttcttcgacataatatataataagcttgttatgccaattaaataaaggaatatgtagcaaggaataatgccaaattttccatataacatttcccattgaaaaataaaatccacacaccattactggaataaaaaatacaataaatgcaacgatgtatcctataattgaatctttccaaaatgaaaacaaataactaatcatttgcaaatgaaaaatctctatcaatagcataaaaataactttgaaatcttctaagccattagaggtatgctctacaaaaagaaaaaacaaataatcggaaacaactacaatacagtcacgtaatatcatttttattaatatatccttataaattatgtgttttttcccataacgaggaagtagaattaccatgttatcatttgcatcattaaataagtccattgtaagataacaaatctcaaggataaacaaaatcgcaaaaaatgataaagatataaggtcaaacgaatgatctattagtattcccccaaaatatatttgtgaacgtactccttctgttattgtaaccagactattatgaaaccccaagtacacattagcataaaaatatctaattacaaatgttataagtgatactagtaagcattttccaacattaacattcaaaatttttttcttatataacttcataattttttatttttctctgtataatgccaatacttaatccaaaaataagcaatatcagaacaatttctcctattatatttccatgaacattaggcataatataaccttgtatagagaattcatttagcccaaagacagaaacaatcaaattaaaaacaatatagaatataaacaaagcaccaggtatctttgcgaaatatagaactttcattttgttataatatgaaagagcataagctaagatagctaatcccgagccaaaaattccgtaattaaaaatgtatattagattatataaagttggatgttgcaatctcaccatatcaagaaaattgtcagcgttatatgataccaaacctatagcgtaatcaggttctccccaagcactgtcatatccatgtattggatatgtcaagtggcataataataaatttatgagcattggtattgttattgtcaaaaaggttacaatcagaatgccaaataattttcctgctaaatatttctttttcccgattctttgaataagtaggattgaactattgcttttttcttctcttattaaggaaagtgatgcaataattgttgcataaacaggcaataacagatacattatatatggaatatatgccgcttcagtgccctgtaatacgaaattttcatttgctgaacgaataaattgataactttttcctatatcattttttacacataaaatatacgaagcaatatttaaaatcattagagcaataaaaacaactttatattctgcacgatcaatacaatgtttgatttctataagaaccatttttttcataatctttaccaaaagggcataaacccacgaagaggtttatgcccatcccttctgttatctaaaatctacatttccacttacaaatgcagttgataattgagattgataattttccattcccataccgacctgtgtgttatttgtttaccatggtatgtgcttaatataacagagtatttaattttttcaatccctctatgcacgaatggtagcccaacatgcacgaactgttctacatataggtataaaaccgaaaagatggcagataggttaagcacctacctgccatctttaatctatatatttcagaaataatgattaattattgtcagtctcatatatagatttataacgctctcgatcaactggaataatctcattatcattagcatctttatatgtaataaactcatcgtattctgtaactgatttttcctctgagacagaattaatagaatacatattcgaatcgttacacattacatttgaatttggaccagaaattagtaacgaaccatcctcttgtgcatatgccaaaaagatataaatggaattttcggaaggcagtgaatcattctcaaacagataaatagcatcttgtttttctgaaattccgccttgtttaacaataggaataggtttatctgtaataagttcaccttttatattttcgagaacctgaatagtataattagtgtaaggcgaaccgacctccttaggatttcctttttcatcttcagtcgttataacatttcgatactcggttccatcgcaactgacaacctttgctacaaatacgtaatcacagataccaacagcttcgcgaatgttatcagtatcatatacaaaagatgcgtgcatctggtggattggcaagttagatacatttgtattcagttgacttgcattatttttggatgcacatcctgtaaaaaacattcctacgataagaacaatagacaaaataccatagatacttgattttttcatagcgttctccctcccctaataattattatatgcggcatcatatgaatctttatcattttgagataatgcctgcgtactagtatgtcccgtaattgctgcatccataacatctgttgaagtactgtgatccaaccctaatgcatgtcccaattcatgtgtcgctacattctgttttttactattactataaccgctcatataataggtattgagttcaattttaccactagaatatgtcatgcctgcccatccattcgaagcattgacatcgcttacgtatacatcttctacaacaaaagcactgtcttttctgattactccagatttatatgcattccatgtggcagccccagtgttaatataactcatgtaagtgctgtttccgtcatagtctagatgtttgccagaatcaacaagatcccatgtttgtacataagcttgtgcaaatgccgtaataggaaatagcattgctatagccattaaagttataatgctatacaataaatgattttttaaaacagattttttaaaatgcatactccttcactccttttcaatcatgtaacaacggttatcttcaattattcttaaaggttatctttatgaaaattgaaacgcaacacatactagtacacattatatatcctgttaatattcctaaagtacgacatcttatcatctccactccatattatagattctcagaatacttaagatgtagtagtataccttgaatataacaaaatctttatacttttcaatacctctatgcatgaatggtagctcactatgcacaaacggtagcatattatgttgtgtacctactttattgatgataaaatatgacggagaatgattaaaggaagtggtagctatgctatatattgactcaatatgggaatatattgttaatttcttagaactggcattgtttataatatttatccataaaaaattgcgtattcgagcaaattataaacatcaagcagttttgatgtttcttttcgtatcatttcagtttgctgtgttatgcacgctgaataaaatgggaatatcatcctacagcactttgatgtcatcttgtgttttggacattggatatgcagtattgttctatcgtgatagtataattcgccgtatcttttggggcttttcgtattccatcatttgcttagttgcagaacagatttcgttctttattcccgttactctttataaaggagcgtctctggagctattattaggtggaacattacggaagccatataccatgttatatttggcaatgatagctgtttttgtcttgttatttcattctattggaaacaaagacatatctctttcaccgttccaaaaagttgcatatattttcatcgcaatttctggacttgcaatcgggcactacatattaaggctgactttggaatctgttgataaatttggtgattcatccttttcagctaggctatcattggttgacttgttttttattattttatttttagtattgatgctatacatataccagctaggttattcaaaagaagaaaacatacgattactggaagaacaaaagatttatgagctggaaaggactgagttcaatagcttatctgagacaactgaacgattacgaaaaatgaaacatgatatgcagatttatgtggatgcaatcaacgtattagcaaaagacaagaaatgggatgaacttatagcatatacagagcaataccataacactcttgcaactacgcaaagtgccatagcaacgggaaatattgctattgactgcatacttaccgcaaaacttgattatgctgaaaaacacggaattaagacagaatattctattatggctcctgaaaattttccgcttgattctgttgatctttcatccatacttggaaatatatggaataattccattgaagcaggagaaagacttataatctctgatccaaccgagcatccatacatttatttttatattaaaccttaccagaatatgatactgattcacattgaaaataattatgatggtgtgataaaaggtagcattgatggagacattttgagtgttaaacaaggaaaagaacatggacttgggataagacgagtaaaagagcttgtagaaaaggcagatggcgtattgcagattacatctgataacaaaattttttccgtacatattatgataccggataaggagaataacaaactactatgaaaatgaaaataaccatacttgaagattctgtgatcgaatcagaacggctgaaaaatggaataagaaaatacgggcagcaatatgattgggatattgaaattgacgaatacgaatcgggcgaagaatatttttcaaaaaattctgaaggcacaactatacaggcttcagcatttttccttgacatacaaatggggcaaatgaatggaattgaggttgctaaacgccttcgtgaatctggttatcaaggtattattgtatttttaacagcttttagagaatatgtattccgaggatatgaagtcagagctttaaactacttgctaaaacccgtcaaggaaaatactctttttctgtgtttggatgaaatcgcgaaggagttatctaataatacctacatataccgaaacaagcaggaaattgtaagtattccctatgcagatatattgacattttcgagcagattacattatgtggatatattgaccgtagacggcaaatgctatgaacaaatgtctaccctaaataagattattgtccatttgccaagtgaatttatccgaacccatcgttcttatattgtaaatatggcacatatctatcgtattacatcaggaacgattgaattgtcaaatcatctaactacacaaatcgcacgttcttattccaaagacgtgataagtgcttttgccaaatatacaacaagatttgatacaagcggggattttgaatgattacgaagtgggctacatctattgctaataagttagcagaactatccggggaggatgtttctgcggatcaattagaaatatacatatatggcttagaatgttttttgaatacttttataaccatagtgttattgttcgtatggggagttttatcacatacactcggctataccctaatttgggtaattaccttttcattgttacgacattataccggaggtgcccatgctccaacgcagttaacatgtatcttaggcagcttttttctcggttgtcttgataagtgggctataatctatttaaagccaactgtactaggatatttgatacttgtccttatgtgtatattatttgcacctataagtaaccataaaatatgtttaaccaccaaacaaaaatggatacataaacttatttctgtgataattgttagcattggatttctgctgttttataaaattggaaacacgaagatgaataccacattgttttattcctttttctgcgtaatcattcttatgatagtcgaaacaattaaaaatctaatgagacactttaaatagcaggatgacttttcataaatattcaaaaaagataaagaatttgatggtctttatcttttttgaatttaattagattatctagctcctctgtctgatggcgaacgatagttaaaatctctgtcctgttcccgtttctgaacttctgcctgtttttctgccagctttcgatggattgagttttctccatacttggagttccattccttgtttgctttgacataggattcatactcggacttgccttgtttatagacttgcaggaacgcatctaccgttggatatttgtaatcctgcacgatatgggataatccctgcttcataatcttaatcgtttctgcgtatttgttagactgtgcctgcaattcctttcgtttctttccttggaataatcctgtacagttcttcaaatcctcgtcaataaggtcttttttcacttcctgcgtatgaatggctctgttttgtcgtttaagtttctccataatctcttcaagtcgcatctcataatcgtgtgccagctcagacattcttggtcttggcggaataacggtcttttctgcggtagtagtagcaggtgctttgaatggttgggtcacagcaggaattgtctgattgtctgtctgtgtaacggatggagctggttgtttctcttgtttttcatttcttcgctccataaggtcggagattctggctttctgttgttcctgtttctgtatcagcaactttatgagttcttttaacagctcgattgcccgaaagataatcataaacaaaagctccggatgattgccatacttgtgaatggattccttaatcggagttgaaatctgttcctgctttacctttaagatttcctttcgctccatccccgataccaaagcgtgatccacagtacgattccagtcctgtatgaccttattattgagtgtaatcttatctgcctttggattgttcttaccgattttcttagtggcaagatagacatccccacgcttgaatgcagacagcttttctttctcatctttgacaagtccgttgatgacatcggtataaaataccttgacctcatctaagaaatgttcctgcttaaagcgagcgtccttgatggtaaacatctgtctttcgtagacctcacctttcttgatcaccttacaccttttacggatagttccattctcgtctaggatttctttcttggtacgaacatgattacctttctcatcatagaacatatttctggtggcaatcttttctatcggttcgtcaagataatttcgttctgcaaagataagatggatatgataattcgtctttcgtttgttatgatggagtgctgcaatacaatcaacaccataccgacttttgaatttatccgtcatatattttaatagtccgtctggcggataatccacaaaggattccggcagggcaatgataaattctcttgcttcgatacattttccctctgtaccgcttttcttaaattctgcctgattgcacttggcaagttctgtccaaaattttcggtctgtggtttcatataccgcatagagattttcctgttttttgtcactggagatataatagattcttccacgaacattatggagctttgacatctgcacaaatgaatttcttggcatagcgatttcctcctttcccagttttgattttggaaaagaggacagataagatagatgagatgtgagtagtaaactttccctgtgagcgagtgcataggcactcgtcttgcgaacacatccgccttgtggcggctaagcctcgcagagcgaaatacacagagtacaaaacgaagttttgtgcgatgggtgtatttcgctctcaaacgccgagggcttgcttatgaagttcacttttagctgtaactgttccctcagcacctaattttgtgcctttaatggcacactttttatgtgccgtatccggcactcccttttcttaacagaaatgctagaagattgctatgaaaatcagcgaaacaatagacgaatccgttagcacttttgccttaacaatagcattgttctattattcagactttttagcaaaaaccgtagaaacagtagaagtctgctattaaaatcgaaaaaacaatagcacgattcgttagcatttttgccctgacaatagcattgtgttacttcgcttacttttaaactgtgtctggcaaggaagtggtagtaaaagttcctattaaatttcatttttaatagtgcattgttttattacattttgattttaatagagctttttactattaactctttgaaaatgtaccccatagattggacactcaaaatcatagtagcgtacactttttgtcataggtcggacagcttttttcatagctacacttggtatgacttctcacagcactttttgtaagttgggtggacttgtcctaccagtcggcttcacttgggtggatggttgcacccacttcattttctggcttgggtggactattcataacaccttttgcatcttgggtggacttgtcctaccaacaagctataactgggtggacgattgcacccattcacatccatcttgtcctcattttccaaaagttctggttgtatctgaggacttgtccgtgatataatctatttgcgtgtaggtatatcatggcttttagtcagatacataccagagggatggtcttaggactgtcccttattcatttttcattgttcccttgaccgcttttactgcgtgtctgtctcgtaaatccttcccctcattgagaatcagaaactcgtctaatcgttccctgcggattaagatttttcttcccactctaaggataggcagcttttcccattccacaagatttctaagagtgtttcttccgatacctgtatagtcggcagcttcttcaatggagagagcaaactttaattctgtcattcgatcacctcattcctgcgtaggattacaagtcttgtatatcagaggatgttcctttttgaagaaaggattagccttttttaaaacttgcgttacgcaattctgattaaagtatatatcttttataacgctatgtcaagccttacgaaattctatcatcttttatagaattgcgtattgcaatatatcgtgttatgtggtatagtaatgacataccgaaaaaggaggttcgcaagtatgttaaaagataaagaattgcgaaagacaatcggtagcagagcaaaaagccgtagacaggagttaggattgaaccagccttatgtcgctgaaaaaatgggcgtgacagcctcaaccattcagagatacgaagcaggaacgattgataacaccaagaaaatgaccttagaaggtctggcagatgcacttcatgtatctgtggaatggctgaaaggtgagacggacgaatacgaaacagacattacggataaaagagaattacagattcgtgatgtgatgacttccattctgaataagctcccttatgatatggaacagtccgaaagtgatttttccaaagacctgctactactgatgttacgggaatacgagctgttcgtggattcgttccagttcgcttgtaagaatttcaaaggaaatacagataacaaaatgctcgcccagacaatggggtttgaatccaataaggaatacaatgagattatgttccttagagaaatcacccacaccgtcaacgcattgaacgatatgggcgatattgtaagactgtattctaagaatcctgagacagcgaaaaatcgactagccaatcttttatcagaaaaagatcccgattcggtatagataggcagacggagctatgatatacttacacgcaagaagcatttcaccagttccgattgccgatatcgaaaggagaaacgattatggcaaaaggttctgtaaggaagaaaggcaagaaatggtactaccgcttttatgtggaggatgcaagtggtaacttggttcagaaagaatttgcaggtacggagagcaaatcagagacagagaaaatgttacgcaaggctatggaggattatgacgcaaagaaatttctagccaaagcggacaacctcacactcggacagatgctagatgtatgggcagaggaagatttgaaaacgggttcacttagcaacggtacagtcggtaactatttacaggcagtaaacaggattaaacaacacccaatcggaaacagaaaactaaagacagtcacttcggagcatttgcagaagtttatggatttacttgcatttggcggtgaggaaggaaattttaagtcaaagggttacaccatcgactatatccgttctttccacgcagtcctgcaacagtccttccgatttgcagtctttccaaagcagtacatcacattcaatccaatgcagtatgtggtaatgcgtaggaaagccgaggaagatgtggatttgttttctgataatgatgaggatgcagaggttatcaacccgattacaccagagcagtatcaaacgcttatggagtatctggaagaaagaaacaagcctgctgtcctgccggtacagatagcgtactacacaggtcttagacttggagaggtatgcggactgtcttggagtgacattaactttgaggaacagtatctgacagtacgaagaagtgtccgttacaacggagcaaggcacaagaccgagattggtccgacaaagcgaaagaaagtccgtatcgtggatttctgtgatacgctcgctgacatcttaaagaaagcgaaaaaggaacagagaaagcaggtattcagttacggagaactctatcagaggaactactacagggaagttaaggaaaagaatcgtatctactatgagctttatcatttggatggcacagaggacattccgcttgattacaacgagattgaccttgtatgtatcagaccggacggagcatacgaagcccctgcaacggttgagacagctttaaggacagcaaggaaacgattgtcggagcttgatgataatttccacttccacaccctgcgacacacttataccacaaacctgctctcaaatggagcagcaccaaaggatgtacaggaattacttggacactcggatgtaagtaccactatgaatgtctatgcacacgctaaccgagaaggtaagcgaaactcagcccgactacttgataaggtggttggagaataaaatcgaataagaaaaactttcccttgtagatacctcataagggcaaaaacaagggaaaaggatacatatagagtggcaaggcataccgccaagtcgcataaaataaggaaagttgagattttagttatacaaattggaatttgcggaggagaacgcatatgaaatacaaagggacgcttattgttgttaaagattgtaaccgtgcgttaaaattctatagtgatatgtttgggtttcaactgcttcaagacaacaatgggaatatggaattgacgaataatttatatttacaggaatcaggatattgggaacaattcacaaaaagaagtgtaattccaaatagtaaccagtctgagttgtattttgaagagactaacatagaacaatttgtagaacgtcttgaaacactttatcctgaaatcgaatatgtcaatcacttgatgacacatagctgggggcaaaaggtagtcagattctacgatttggatggtaacttaattgaagtaggaacaccggtgtaatcaataaattccaatttgcatgagacttttgtgagacaaacatgagactgacatttgcgcaatagtatgttattgttatagtgcagaaacaggaactgagggaaataaccttcggttctttttttatgccgtggcggaggtttcgtactcctttcaaccgccacgtacatagaagggaggaacttggaatgccaagaaaaccaaagaaaccgtgtaagcatccgggatgcccgaatttgaccgaagggttctattgtgaagaacatgaacaattacatcgtggagatagagtaggtgcagcagaccgtggttacaatcgtaaatggcagaacgctaggaaacaattcttaaaagctcatccgttatgtgtagaatgtcagaaagaaggaaagtatgtgaaggcaaccgtcgttgaccacattattccacatcgtggagatccagttctgttctgggacgaaaagaactggcaacctttgtgtaagcaccatcatgatagtaaaactatgacggaagaccgataccaggagtatcgttactaattaccagtatgtaacagaaattcttggtagttcttcgtatggataaaaaagaacgcttcgtttatagtgtctcgctgaaggaggcgatgctatggatgaaagtgaaaaacaatttttaaaggaattgctggcacaccgtatggagatacattatcaaaggatttgtaatgccaagacctatcagcagagaaaagaagagttggaataccttgaggaactggaagaaaagtatcagaaggttcttcattccctgtcggatgaggataaagaaattataaaaacttatgtggatgatgtcagtgacaaggcaacggaagaaacagaaagatattatcgttccggctttgaagatggattaaagttgatgggtgcgctcatcaaatattacatccgatagctgatgcggggggatatcaaatctctgtgaccctgccccggtcagaccgccgccccctcaaacgtgaattttcgcagaattaaacacgggggataggtcggttgcgctaattgatacggaaaaagccttggaatatcatatttttcggtcgtagagtttcgttaaaaagtaaataaaaaccatgttttttatgagtaaaaaagtgcgaaaataggtgcttttttactcattttttatgcccgtgaaaggaagtgagagaatgacggagcaacaggcaaaacaaattgtagagatgcgcctaaagggtgttggctataagtccattggaactgtggtcggactatcccgtgacattgtaaggaactattgtaagaaccataaccttaccggttatgcatctgcacttacaaaaaatgtacaaatgaagatggacagtggggaagcttgtctgtattgtggtggttcgattacaaaaccgaaaacgggcagaccgaaaaagttctgctcagagaaatgcagaagggaatggtggaagatgcacccggaagcattgaagcgaaatgaaaaggcaatgtatgaactggtttgtggacattgcggaaaaacatttatttcctatggaaacaagaacagaaagtattgctgtcatgattgttacattaaggatagattttggagggacgaggagtatgaaaacagcaaagttgtcggtcttaccgattaaggatttaaacccggcagaatataatccccgtaaaaagttaaagccgggtgataaggaatatgaaaagattaaacattccattgaggaatttggatttgcagatcctgtggtagtcaattctgatatgaccatcattggtggtcaccagagagtaacagttgcatcagcacttggatatacggaagtgccatgtgcaattgtagatgttacaaaaacacaggaaaaggcactcaacattgcgttgaataaaatttctggtgaatggaaccaggagctgttggcagatttgattgaggatttacagaactcagaatttgacgtaggcttcacaggttttgaaccgccagagattgaacagctttttaataaagtccacgataaaaaagtcaaggaagatgattttgatgtggatgcagaattaaagaaaccgactgtagctaagatgggggatgtatggttactcggaaagcaccgtgttatttgcggtgattccattctgccagaaacctataacattctgatggatgggaagaaagcaaatcttgttctcactgatccaccttacaatgtgaatgtagaagaaacagccgggaagattaaaaatgataacatggctgatgaagatttctataatttcttgtttgctgcatttgtaaatatggaacagaacatggagcaggatgcttccatttatgtgttccatgcagacacagaaggattgaatttcagaaaagcctttgtaagtgctgggtttaaattatcgggatgttgcatctggaaaaagaatgcactggttcttggaagaagtccatatcagtggcaacatgagccatgtctctttggatggaagaagggtggaaagcaccagtggttctcagatagaaagcagactaccatttgggaatatgatcgtccgaaagcatcgaaagatcatccgaccatgaagccaattgctcttatggcatatccaattcagaattcgtcaatgatgggatgcgtggtattagacccattcctcggttcaggttctacgctgctggcatgtgaacagactggacgaatctgttatggaattgaattggatgaaaaatttgtagatgttattgtcaaaagatatatggagcagaaaggctccggggatgacgtgtatgtaactcgtgatggtaagaagctgagatattcagaactggaactcccagagtcctgtgaataaatatcataattaacttgctatttcctccattcagagtgatatatgtactaaccaaaatgaatggaggaagtacatatgaaatttaaaacaacagcggaaaacagaaaagacatcgttaaggcgatagaagaaattactggagtaaaatccatctatgtaggtgcaccgaccttttgctataaagtaggagatttcagcatcgacaaagaaggaagcgtagaaacagaaaatgagagggcaggtaaacagatgcagagtgaattgattgcaaagggtcttgcagaaggcgaaaaggacaaattaaatattgacattccgatggaagggtttactgcagagagtcttaaaaatctgatttacctaattcacagcaagcagtacctacttgagaaggcagttggtgtaaaagtacttggggtttccgatacattagtagagaagctgaaaaccagagagggaatgccattagaagaaacggttcagatgattgtggaacatgaaccgttgggcatgatctttacacaggaacgcatcagcttttgtgaatttccattttcgatagagagtgcgaacgtctataccagattggtttcagctatggcgcagatggcaaagagccagaagcgaattaatccacagcagtgtttggaagaaaacgaaaagtattatatgagggtttggctcattcgactcggcttcgggggtaaggacgggaaagaagttcgaaatacacttcttactaatctgaaaggacataccgcattccgaacagaagctgagattgagagagccaaggaaagaaataaggctagaaaacagaacgccacagaagcgtaggaatgttgcatttcgacacataagaccgccataatatacacaatttttcagaaatttacatctgaaagtttgtgtacattatggtgcagaattgactggataatatgtgcatttagagcgaacatgtgtactaccaaaaggaaaacaaaccaaaaggagtacataaacatgaacgaaaaaacaagagcacagattgaagcaatgaaaaaccagacaatcggagttgaggttgaaatgaacaacattacaagagagaaagctgcaaagaagattgcaaagtttttcggaacaacagcctactatgcagcaggagaatatggatacaaagcttgggcttgcaaagaccagcagggcagggattggaagtttatgagagactcaagcattagcggaccagatgatgaaaaatgcgaattggtaacaccgattcttacctacgatgacattgaaactttacaggaaatcatcagacagcttagacacgctggagcaaaatcaacaccttccagaggatgcggagtgcacattcacatcggactcggagaccacacaccacagagccttcgaaacttggtaaacatgatggctgcacacgaacaacagattggaaaagccattcgactggatgcttggagacagagaaattactgccagacagttgacccggatttcttaaaaagactgaaccgaagaaaaccaaagacttttgaagctatgcagaaactttggtacaacggaagagacggaagcagagagcattacgacagtagcagataccacatgctgaaccttcacgcaacttggagcaaaggaaccattgaatttcgacttttccaatttgcagaacgctccgaagagagacagggcggacttcacgccggggaattaaaagcgtacattcagctttgcctcgcaatgagccatcttgcaaagatgctcagaacagcaagcccgaaacagcaacaggaagaaaatccaaaatacgctttcagatgctggatgctcagactgggattcatcggggaggaatttgaaacagcaagaaagattttactccgaaacatggatgggaattccgcttggagataaagatacatacacaaccaccgaccgctccggcggtcttagggtggtaggaggggagaaaatcccccgaagaaaggatgaatacatatgagtaaaaagtattacttagcttatgggagcaacttgtcaatgagacaaatggctgaaagatgtccggacgcagtgtatgtaggaactgcagtcattccggattatcagcttctttttaagggaagtcttacagggagctgccttaccattgaaaagaaaaagggcagtaaggttccggttttggtctggcagattagcgaaagagatgaaagatatcttgaccgctatgaaggctgtccaatcttttattacaaaaaggaaatgaggttatcgatgcaatcactgatcgatggaacggaacttggagaagttgatgccattgtttacatcatgcatgaaaaccgaggtcttggatgcccaagcgactattactatgaagtttgcaaggaaggatacagacgcttcggattcgatacgaaggtactggaaaaggctcttgcagacagtgttggaaaaagaaaagcgagtgcttttttacgggaggtgccgatgtatgaatagaatgacatttccggggagagaagttgtagagagggttcgaagccaatatccagcaggatgcagagtggtattggaatgcatggatgatatgcaggcaccgcctataggaacagaaggaacagtaattggtgtggatgatacagcatcgattatggttcactgggataatggtagcaggcttcacgttgtatatggagtcgaccgttgcaggaagatagaggtgcagtaatggatacaagagtaaaagaacaaatccttgtcattcgagaaactggccttacaaatatgtttgacatatacacagtgcagaggcttgcgtttgaaatggaattctgggatttggtgatttttctggaagaaaataaagatgcttatgtacagttcattttgacaggagaataatataaatttacgaaaaaagacttcttcggaggtctttttttcatgccattttttaaggaggtgataacgatggcgcagagaggaagaaagccaaaacctacggcagttaaggttttggaaggaaatccgggaaagagaagtttgaataccagagaaccacagccagaaaagaaagcaccacgttgtccttcatggcttgaggatgaagcaaaaaaagagtggaagcgaatggcaaaacagctggagcatctcggtattttaactgaagtggatatggctgcattcgcaggttactgtcaggcttatgcaagatggaaggaagcagaagaattcattacccagcatggcacgattgtaaaaacaccatccggatactggcaacaggtaccacaagtatctattgctcagacatatttgaaaattatgaataagttctgtgagcagttcggattaacaccatctgcacgaagcagaattgttacagatacaggagacagcaaggaaagtgatgaaatggaacttctgctgattaagggaggcggagcataatgtttgataaagcaaaagcagatcatgcagtcaactttattaattgtttaaaacacaccaaaggtcagtggagaggagttccttttgatctgcttccttggcaggacaagattgtccgggatatttttggaacggtaaaagagaatggataccgtcaatataatacagcgtatattgaaattccaaaaaagaacgggaaatcggaactagctgcagctattgcacttttaatgacttgtggtgatggagagtggggtgcagaagtatacggctgtgcttccgatagacaacaggcttctatcgtatttgatgttgcggttgatatggtagatcagtgtccggcacttaagaaacgtatcaagccagtcatgtctgtaaagcgacttgtgtataaaccgacaaatagtttttaccaagtattatctgcagaagcatatacaaaacacgggttgaacgtacactcagttatcttcgatgagcttcatgctcagccaaacagggaactgtttgatgttatgaccaaaggttccggtgatgcccgaacacaacctttgtattttctgattacgactgccggaacagatagaaattccatttgttttgaacagcaccagaaggctttggatattatcgaaggacgaaagatcgatccgactttttatcctgtaatttatggaatcaaagatgatgatgattggggaagtgaggagagttggtataaagccaatccatcccttgggcataccattgctattgaaaaagtgcaaaatgcttacatcagtgccaaggaaaacccagcagaagaaaatatttttcgacagcttcgattgaaccaatgggtgaagcagtctaccagatggatgccgatggataagtgggatgcctgtgcatttcctgttgatccggaagaactgcgaggcagagtttgttatggaggacttgacctttccagtacatcagatattacagcttttgttctagtgttcccaccaagaacagagaatgaaaaatatatcattattccacatttctggataccagaagagaacatgagacttcgtgtacgaagagatcatgttccatacgatgtgtgggaacgacagggttttcttgaaaccacagaaggaaacgttatccattacggttttatcgagaaattcattgagaaccttgggatgaagtacaacataaaagaaattgcattcgaccgctggggagcagtacagatggtacagaaccttgagggaatgggctttacggttgtcccattcgggcaggggtacaaagatatgtcaccgccaaccaaggaattgatgaagctgacattggaagagaaactggcacatggtggacatccggttcttcgatggatgatggataatgtgtttgtaaggcaagatcctgccgggaacatcaaaatggataaggaaaaatcaactgagaaaattgatggtggtattgcaacagttatggctttagatagagctatccgaaatggtggaacaacaggaagtgtgtatgataatcgtggaattcttatattctaatatctctagaatagtgctatacttaattcagaaaatttgaagttgggtagtgtcaagtaagttatgaaaaaagtgagccaaaaaaataggctcgattgaaccttgaaaattgcagatattgataccgaaaggcgctccgcgggcttagggcgttgccctaagaacctacaagggactcgtcccttgacccattatcgggcgttgcccgaacccatcctcgccggaaggcaggaaaagggcgcagttgccccttttctgctgaaacaggataatccgtcagctttatgtcaatagactttcgcggcatatcctcacagtcggcgttgccgtctgctgcggtattccacggttctattgacaacagctccgctccgatgtggcagtaacatttttttgcatattcaggatagtttgctgtccgaggaagataagaagttgccatttggctggcatgttatcagcattctggagcatttctacttcgtttagaactttgtagccgttgtgtttatgtggtcgcaggaagttatagtaagcgacccagagagccagatcatagttggcaccgtcgatgttgtcaaagccatttgtgtggcggtaagaagctttataggtacggttgaggcgttcaatcatctgtttgaaaggccggtattctgtagataccgcatcgtcgttggtaagtccaatgacctgagtgatattgaaggtaaagtcttctttgaatttgcgggcgaattccattgcggcaagagggtaagcactgtaaccgtcagcgataaatttaaagttttccgggagctttgtgagtccctggaaagccatacgcattgcaaggatacagggaccaacaccacggttgtcagatacctgatatccgatgatggatcgtgtagcagcattcatgatgagccagacgtaagttttgatgccacggattttgatgtaagtttcatcggcagtgaaaacatcgccttttttgtagggatattgatctacaaaaggcttgatgcagatagcggcagtcttacagtagttggcaatctgctggtgggaaatgctgatattgtataggtctttgagtgcctgagaggtttttcggagggacagaccgaggttgacatggatggtaaggcacagagacatgacgtgtgcgttgtgtttgctgaacttcagtgaggaagtattcttgggaagggagtttaagtccatgctgaaaaaatccatcgtgaactcacgatagatgtagtggagtttatatttattttttccatagtcttcttttaggtcttccttatcgactttcttgaggttgtggaggtaataagggcaattcggatttacacatttgtggacaataaagtgtttccggtcttttttaggaacgagggtattgccacagtgtggacagcgcagtttcattgatgagaaacggttgtcatggggagaaaatctggcagcacagattttacagagtatttgccctttagaaccgttgtttttgtaaaggaaggacttgggtgcatcacagcgtgggcaggtgcaggtatcagggatatcgcactcagaacggcggctgacagggcggattttcttgccgtaacgtttttcaaagtaagggatgaggtctttgtagttccagtcctggcggaagtcagtgaccagagggagttcatcaatcttgaacttttgatactttggagaatgggaatcatcaaaagcccactgcttgagaggaatgtatctgcaaataaagttaatcagccagcagttttgttggtaaaggtattgaattaattgaagtaaataaagtataatgtccatgagcattgactccttttgtataaggttggtttggcgattgacattataccaaaaaagggaggtaaatgctctttttatttgcaaactcccgaaaataaaggtttttaaggaaaaaataggtagtaaacttgacactacctgaagttgtacggaggaaatatatatgaaattatcaaaaatacatcatgttgcaattatcggttctgattatcatttatcaaaagatttttatgttaataagttgggtttttctgttatccgtgaaaattatcgcgaggagcgtaacgattggaaaatagatttggcaatggaaggaaacattgagttggaattatttatcatatcgaatccgcccaaaagagtttcatatcctgaagcatgtggcctaagacatttagcctttcatgttgagaacgttgaagaaactgtagaaaaattatctcaaataggaatagaatgtgaaccgattagaatagatgaatttacgaaaaagaaaatgacattcttttttgaccctgatggattaccattagaaattcatgaataatggagaattcaattttacgaacacttaaaaatttcagtttatccgagtgataaaaaccagtttgatccaatattgaaaacaaagatttacaggcacttacagaaatgtaggtgcttttttcatgcaaagaaataggaggtaaagctatgggattacgagaatggattggtgtccgtggggcaagagacaaacccacaaatagttatgcaggttcggctctttcctttttgtttggcagaagcacaagtggtaagcctgtcaatgaacgaactgccatgcagacaacagcggtgtatgcctgtgtcagaattctttctgaagcggtcgcatcactgccattaaatttgtaccgatatactgataacgggaaagagcgtgtgtatgatcatccgctttatcacgtactgcacgatgaaccgaatgaggaaatgacatcctttgtgttccgtgaaactttgatgagccatttgctcatttggggtaatgcctatgcacagattataagggacggacgagggcaggtacttgctctgtatccattactcccggataagatgcaggttgaccgtgcggagaacggggagctttattatatttattccagaagttcagaagagaacccaaattttaaggataccggagatatcattcttcgaaaagaagaagtacttcatattccgggacttgggtttgatggtctgatcggttattcaccgattgcaatggcaaagaatgcagttggtatgacgattgcctgtgaagaatatggagccagtttctttgcaaatggtgcgacaccgggcggtgttttggagcatccgggggttttgaaagacccggcaaaggtaagggacagctggcattctgtgtacggcggttctaaaaatgctggtaaggttgcagtccttgaggaaggcatgaagtatcagcagattggaataccgccagaagaagcacagtttctggaaacgagaaaattccagatcaatgagattgcacgaatgtatcgtattccaccacacatggtaggggatttggaaaagtccagcttctccaatatcgaacagcagtctctggaatttgttaaatacaccttagatccttgggtgtgcaggtgggaacaggcaatgatgaaagatttattgcttccacaggaaaagaaggattactttatcaagctgaatgtggacggacttcttcgtggagattatcaaagccgtatgaatggctattcagtagccagacagaacgggtggatgtccgcaaatgatatccgtgaactggaagatatgaatccaatcccggcagaggatggtggagatttgtatctggttaacggaagcatgacaaagttatcggaagcaggagcctttgcagggaatgccggaggcaatcttcccaaggtgtaacatgcaacagtacgttgcaaaagctgtgtcagaaacacagatttcaacacaatgaacacaatagaatactatgaaatcggcaagacggtatccgtttggatgcggtctattttttatgccttttttcatggaaaggagatagagagcttatgaagcgtaagttttggaactggctcaagaatgagcaggaaggtacaagaaccttgtttttaaacggagagatttctgatgagacgtggtatggcgatgaagtaactccgaagctgtttaaacaggaactgacttctggggaaggggatatcacagtgtggatcaattcaccgggtggtgacgtgtttgctgcagctcagatttacaacatgctcatggattacaagggaaatgtaaccgtaaaaattgatggtctagctgcatctgctgcatcggttattgcgatggcaggaaccacagttcagatgtctccggtagccatgatgatgatccataacccggcaaccattgcgattggcgattcctctgaaatgagaaaagccattgaaatgctggatgaggtgaaggaaagcatcatgaatgcctatgaaatcaaaacggggctttctcgttctcgcatttcacatctgatgaatgcagaaagctggttcaatgcaaaaaaagctgtggagcttggatttgcagatgagatcctttttgccaagggaaatgaggaagaagaggaaccggaagaggaagacgatgaagaagaaaaggaactgaagatggaagcggtgatgttttcaagaactgcagttacaaattcattactttccaagttgattccgaaaccggagaaaaagacaccaattgaacagttggagaaacgactgaatcttttagcacattaagggaggattttcaatatgaataaaattttagaattaagagaaaaaagagcaaaggcatgggatgcagctaaggcattccttgatgccaaaagaggaaatgacggtctgttatctgcagaagatacagcaacttatgaccgtatggaagcagacgttgttaaccttggtaaggaaattgaccgtctggaaagacaggctgcaattgatgcagaactgaataaaccaatcaattctccaattacaaataagccaaatggcagagtggatggagatatgaaaacaggcagagccggtgatgagtataagaaagcattctggaatgcgatgcgtaagaaaaattattacgatgtatccaatgctctgcaggtaggtacagagtccgaaggtggttaccttgttccggacgagtatgaaagaaaacttgtggaagctctggaagaagaaaacttcttcagaagtcttgcaacagttattcagacatctaatggggaacgtaagattccagtagttgcatctaagggcgaagcaagctggatcgatgaagaaggagcattcccagagtctgatgacagctttggacagattacaatcgcatcctacaaagtagcgacaatgattaaagtatctgacgaactgttaaatgacaacgtgttcaaccttgagaactatattgcaaaagagttcggtagaagaatcggacgtaaggaagaagaagcattcttcctcggtgatggtgttggaaaacctactggtattttcaacgcaactggcggtgcatctgatggagttactacaacaggggcaaacattacatttgacgatgtgatggacttattctattcccttaattccccatacagaaagaaagcagtatggattttgaacgattccactgtaaaggcacttcgtaagttgaaagatggaaatggaaattatatctggcaaccatctgtacaggctggtgtaccggatatgattttaaaccgtccttactacacatcttccttcgtaccagaactggctgcaggtgcaaaagcgatggcattcggtgacttctcttactactggatcgcagatagacagggacgttccttcaaacgtctgaatgagctttatgcgacaactggacaggtaggtttccttgccagccagagagtggatggtaagctgattcttccagaagcagtgaagacactgaaaatgaaagagtagtctttgggggaggtgtatcttcatgcttttgaccttgggagaagccaaagaatatctgaaggtggagtttgaggatgaagatacactcatcctcactttactttctacggcagaaggtgtgtgtagtgacatacttcgtagagatctttctgaggagtcggatgttgcaaagaccgcagtattgtatgcggttggggttctttatgaaaacagaggtacagatatcaaagaactgattccgaccttaaagagcattctatctggtagacgaaaggcggtgttctgatatggatatcggttctatgagacagaggattacgttgcaggagcataagactgtagtggacgggattggaaatcatatctctaaatgggtggatttttattcctgttttgcctatgtcaatctggcatctggaaatgaaaatggcacacagccagcggtaaggacagaggatattttgacttttatcgttcgatggtgcaagaaactggagaaccttaacagcaaggaataccgtatttctttcggtggtcagttctataacatcacctgcgtggatgatgtacagtttgaacaccggaaactaaagctgaccggaaagaagattgtgagggaataggtatggctaagaaaatatccattggaaatatgagtagtgccattatggaagccttagaagagtacaaagaggttacggatgaagtcgtaaaaaatgcggtggacagtgtttccaaggaagcaaagactatcgcaaagactggttcaccggaacgatatggtggttacaaacagggatgggcagtcaaaaaaacagttgatcgtagcagtcaagtaagcgttaccattcataatcgtaaaaagccgggactgacacaccttttggaaaaaggtcatgtcaaacgtggcggtggcagagtggaaggcattacacacattgctccggcagaagattatgctgtgaaagagctggaagcagaaatcagaaaggggctgaagtaatgtcatttgaagaaattgtaaaaatgttgggcggtatgggactgccttttgcataccatcactttgcagaaggagagtcaccggaaccgccttttttaatatatgtaacacccggcagtaacaactttggagcagatggaaaggtctactttaaagcgaaacagctagatttggaattatatacggacaagaaaatgccggaattggaagagcaggtggaagcagtgctggatgcttatgaactgttctatgaaaagaccgaaacctacattgagtccgaaaaattatatgaagttttatatgaaatggaggtttaaagttcatgggaaataaagtgaaatacaatctgaaaaatgtgcatgcagcaaaactgacagaaacagtatcagatggggtgacgtctttcacctatgcaacaccaaagacaataccaggtgcggtcagcattagtctcgatgcagagggagaatccagtccgttctatgcagatggcattgtatatttccgttcttctaccaataacggttacagcggtgatttggaaatcgccctgatcccagaatggttcagaacagaaattctgcaggaagcgttggatgccaaaggtgtgcttgtggaaaacagcaaggtgacagaaagcgtcaaatttgctctgctctttgagtttgatggtgatgtaaatgctatccgtcatgtcctttataactgtagtgcatcccgtccttctatcgcatctgaaacaaaagaagatacgattgaaccgggaacagaaactctttctgtaacagccgatcctcgttctgatggattggtaaaagcacgtactggggatacaacagaccagacggcatacgcagattggtacaaaaatgtgtatgtgcctacagaaaaagcagaataggaggtagcgtggaatgattaaaagagaaatcgaaatctgcggaaagaacgtaccatttcgttcttccgcaaccattccacgtttgtacagagcaaagttcaaacgtgatatttttaaggatttatccagactggaatcctcttacaaaggaaaacagaaaaaaggctctgagttccagattgaagatttagaaatctttgaaaacgtagcatacatcatggcatatcatgctgataattccattccatctacgattgaagaatggctggatcagtttgatatgttttctatttatgaggttcttccacagatactggaattgtggggagataacatgatgacagaagtaaaggcaaaaaaagagttggcaggagtgaacgggaaatgacaacgccactgttccttctgcgtagtgtagagattggcatttctgtggcagatttagacttgcttacggtaggtctggtcattgatatgtggacagaaaaagccaatgatggcgtgaagtataacagagtagcgacacaggaagattttgataagttttaatgacgcatccggaagggtgcgtttttacatatatcgggaggtgagatgatggcaggcagaattaaggggattacgattgagattggtggcgataccacgggtctagacaaagccttaaaaagtgtaaattcttccataacaaaaacccagtctgcattaaatgacgtgaaccgcctgttgaaactcgacccttccaataccgtattggtagcacagaagcaacagcttctttcacaggcagtcgatcaaaccaaagaaaaactgaatgctctggagtccgcacaggaacaggtggcagacgcttttaagcgtggggacattggagaagaaaaatacatggcgtttcagagagaaatcgaagaaaccagaggaaagttaaatcagtataaagcagacttatccggcttgcagtcagagcaagatagtctcgcaacaaacacagcaagactccaaaagctgtttgatgcgacggggacagaagtggatgattatgcagatgctcttggaagcaaactggtatctgcaattaaaagtggcactgcaagttccgatcagttaaagtcagctatcgataaaattggaaaggctgttactgggggtaaggcagatgtcaaagaattgagagatgccttagataccatagacgatggaactgcagtcaaaaatttaatccaggacttaaaggaagtcggggatacagcggaagaaacagcagaagatattggagagattgcagaagctaccaagggtgcagctcttatggaagctgcagaacagctatctgcagtgggagataaaatacaggaaatcggaagtagtgcaatggatgcatattcggaggcagaaaatgcagtcacgaaagtgaatgcatactttggtgaaaccggggatgcagcagagcaatctgcttctgtaatcaaatctgtatatgaagccggtgttggtgaaagcatggacagtgttgccaatgcagtcctcatggtaaaaaagaaccttggcgatttgagtgatactgatctgtctaatctgacacaacaggctattacactggatgaactttacggcattgatatgaacgaaacccttcgtggtgtaaattctttaatgcaacagtatggtctgactgcgcaggaagcaatggactatatcgtaaagggaacacaaaacggtttggataagaccaatgaattaggagataacttaagcgaatatgcaggtaagttttcacaggcagggtattccgcatcggagtattttcagcttttggataatggtcttaagaatggtgcatacaaccttgataaggtaaacgatgctatcaatgaggttactactagattggtcgatggaacaattggagagtccatcggctctttttctacaaagacgcaagagttattcacttcatggcagaatggaggagtaacacagaaagaagtcaccgattctattgtagcggatattggaaactgtacgaaccaacaggaagcgttaaacctagccgcacttgcttttggaacaatggcagaagatggaaacttaaagtttattacatctttaacttcggtcggaagtacttatgacagtgtggctggctccgcacaagggatgttcgatgcaacgacaacaccaatgcaacagatggaagcaaatactagaaaacttcagcagtccttagtacctttagggcagaagttgatggaacttgctaataccatcattcctccacttgttgctgtgatcacaaccatcagtggatggtttgaaaaaatgccagagccggtacagaactttgtcattattctaggggcgctcattgctgtgttcacagcactcgtccccgtgatcgctgcagtagcagtatccgttggtgcactgaatatttcgcttgcaccaattatcggtattatcgcaggggtagctgcagctattacagccatcattgcgattgtgaaaaactggggagcaattaccgagtggtttggtaacctgtggactacgatctgtaacggaataggtcagatggtagagacacttaagacatggttcttaggtttgtgggaacatttgaaagctgtgtgggaaggcatttgtaatgtggtgcaaactgcagtcatgctgattggttctattctacaagctgcatttgatattattacacttccataccgatttatttgggagaactgtaaagaaattattatggcagtgtgggaagccatcaaatctgtagtatcgaatgccatcaatgcagtgtccagtgtgatttctacagtaatgggagcaatccagaacgtgatgtctacgatttggacagctatcagtacaaagatttccagtgtactgaatgcgataaaaatgattgtaacaaccgtatttaatgctgtaaaatctgtggtttcttctgtttggaacggtatcaaatctaccatttctacagtagtggatggaattaagagcaaagtgtcctcggtatttaattctgtaaaaagtacagtatcttctgtattcaatggaattaaaagtactgccacatcggtttggaatggtatcaagaatgctattctgacgccgattgaagcagcacgggataaaatcaaagggattgtggataagattcaaagtttctttgcaaatatgaaaatcagtcttccaaagattaagctcccacactttaaaatttctggaagcctgtctattgcaccgccatccgtaccgaagctctcgattgaatggtataaggaaggtggtattatgaccagcccgactgtatttggcatgaatggaaccaaccttatggcaggtggtgaagcaggagcagaagctatcctcccattgaaaggtttctatgacaatctggaatcaattctttctagcagactggatatgtccgcaatggaacagtatcttgcagtgattgctgctaacagcagtaaaggaatttatctggaagatggtacacttgtgggacatttgcttccggaaatcgataataaattaggacaggcgcagaagctgaataggaggttgagtttatgatcttggatgtgatgatcaatggaatttcattatatggtctggggtggattcgagagatgattgattttccgactccacagtcccagacaaatacgattgtggttccgggacgaaactctccaatacgatataccgaagccttggggagtgtgtcctatcaaccacggcagtttacgattacgctttccatgcatggcacaagggaatcctttaatcagaaggtcagtgaagttgtaaatcgttttgccggaaggctctgcgaggtggtttgttccgatagtgcagatgtatatgcgattggcacgttagaggcctcatcgacttatgatccgaaaagtcataagggacagctggtgttgtcctgcaccgatggagattcctatctgtaccatacaaaggagacggttgttgtggtatcagtcagtggaaatgttacacttaccaacgactacatgcccgtagttccggtagtcacaacaaccgctgagactgctttttcatggaaagttggtgaagatacatttcaaaaatctgtgagtgctgggacgtgggaattcccagagatggaattgcaggaaggaaaaaatacacttacggttaccggaaatggaaccactacatttcgatacagggagggtaggctatgagtttatttcgcatctatgtggatggtgcgattttctatcatccacacttatccaaacttgcaattacgcaggcgcagataaatgaggatgcggaaaatatcgacagtctgactctgtcagcaccattcaatcatccatatttggatagtattaaaccgatggcttcggtcatcgaatgtaaaaagggaaaagtaacagtgtttgaaggcagagcactggacgatggaagtgatttttataatagtcatacctggacttgtgaatctgcacttgcatatctgaaagacagccttcagccaccttatgaatatacaggaacgcttcttggacttctggaattatttgtatctgaacacaataaatctgtggaagaaaagaagcgttttttgattggaaatgttacggttacagatgataacgattatatatcctacagtaattcggaatattccatgacgctggatgccatcaaagagaagctaatcaaaactcatggtggctacttgcaggtaagatataccgaggaaggaaaggtgctggattatttatccgattataccgcttattctttacagactgtggagtatggaaaaaaccttctggatgtgaagattaaccgtgatcatacagaacgctacacggcattagttcctttgggagcaaaaataaaaataatcgatgaagaaggaaatgaaacagaaaccgatgagagggtcagcattgcaggggtcaatgatggggtgaattacgtttatgatgaagaagcagtagaagaaatcggatggatttggactacggaagtttgggacgatgtgactattccgggaaatcttctaactaaatccaaagctagagtgatggaacttgccaaaggcatcaccagcatggagctgaccattgtagacgagtccgatacaggagctgacatcggagatatccgggcaaggcagtatgtgtattgcaagtcaccgccacatggaatagatggcaggtatctctgtgttggaaagacaaaagattatctgaatccatccgggaataccattaccattggagcaagcggtgtaacacttagttccatttctgccaagcagaatgaaaacctttctactttggaacaggatattttaggacagaccgtgaagattgagaacatctccgggaaagtcgatgatatcaataattccaagatgtatcggacggaacttgtggtagatggagtgaacatcttccgtgacaagggacagcaaagtaccatgcgctgtaaagtttattcttgggataaagacattacggataccttagaagagtcctgtttcatttggcacaggaaatcaaacaatgcgactgccgatgcggattgggacagccagcacatcggaacaaaatcagtcattattacaacagaagatgtgcaggacaacgcatctttttattgtgaaataacactttgataggaggattttatatggctacagttttaacttccagccagcagaccttcgttgatattacggatcaacgaaagctgtcggcttatattacttccaatctgcctaagacgcagagcgaagatccgaacgtactgccacacacgtacgccccaagctgggcaacgactaatttgaaattaacaccagttatctttttagatcagaccaatttggcacttaatgcttccggtcttacaattacatggaaaagaaaagatggaaccagtgcggaagcgtctcttacgacaggcgaaagtgcatcgggaggcattttaactgtaagtaaagatatactggcatcatcatcttctggaatgattacttatatctgctacatcagttattatgattcagaaacaaagaataccgtcaacatttctgcagatattacctatactctggtaaagaatgcagagaatgcaagactggcttatgtgacttctgatacttatgtatttaagtacaataccagttcctctttagtaggagcatcacaggcaacacttactgcacagatacagggagtatccatttccaagtggcagtataaaaacagctccggtacatggacggattacccgacaacttccgataacagtaatattacaagtggaacgctcgtagtaaaacctgctcatgctgtatttgtaaataatgtagcgcagattaagttagtgacggatgatgcagatgtttatgatactgtaactatcacgaaaatttatgatggtgcgaaaggggagcaaggtgcttctggtactgcaggtacaggcggtctttctgtcattctaggaaacgaagcacagaccattgcctgcagtgcatctggtgctgtatctgcagaactttcaattacaatcccattcactggttatgtaggtattacccagaccgcttgtacttgtacagtcggtacgcttccaagtggaataacggtaaaaacgaatactgcagctacagcaagtgcagctggttctttagtacttacggtagcttcgggagcaacgttgggaggagcatcggttctgaatggaacgattgatcttacttttacaatctctggaaaatccgtggtgaaaaagtttggctggacgaaatcaaataagggaagtaatggaaacaatggcgttaatgctgttgttttttctgtttatgctccaaatggaactattgtacagaatcaatctggaacactcacgctcgcaacttctgcgtatagtggaacaactgccattacgggtacttaccagtgggcaaagtatgtaaatggtacatggacgaatatcagtggtgcaacatcagcaacgctttctgtttctggtgcagatatcgtaaatattcagtcttatcgttgtacgatgacctatgatagcaagacatatgtggatgtgattaccgtggaagataaatccgatccttatgtgtctgaaatgctttccatcggaggctttactgtaaaaaacaatctgggaggagtggttccgtatgttattgtacgcaccaaccagaaggaagtagatccactactcggaccgattagtgaaaccgcaccatcttcaccttcagcaggtgatttctggtacaaaatagaccacgataatcagacggtaacattaatggattatgctggaagtgcatggaacgaatgtccggaagagcagagccttacttacacatggtatatgcaggataaagatggcaatacagtagagtttggtaagactggaaaagtaatttatctttctgcagaagacattgatagccttgtaacattgcagtgtgacgtatctaagtaacaggaggtgatgtggaatggcacttattacctcttgtcaggcgagcttccagagctttgaagattatgaacaggcagtagaggatgtggagaatctgaaggtcaatgtgcaggagtgctattccgaaatcacaaagacttctgaacagatcacatcctctgttcgtgaggaatatatttctaaatcagagatggaattgatacaacaggacttccagacgagcattacgcagaacagttctgaaattcgtatggattttactgccattacaaatgaaatcaaagaaaacgtttctgcaaaccagacgcttctggaagagtatattcgtttcaaaggggcactcattgaacttggaaaagtaggaaatgcatttacagcagaactctccaatgaggagcttgcctttaaagaaaatggacagagaattgcttatatttcgaatcagattttggtgattaccaatgcagaaatcagaaacaaactatctctcggtaatgaaagccgagggtggtttgattttttgccaagaacatcgggaaacttgtctatcaaatggcgagacccaacagcgtagaggaggtgagggcatatggcttcaagtggtagtttttccggctccattcgagacggacattataaattaagagttgactggtcgcagtcaaaaaatacctctgctaataccagtactattacttgtaagatgtatctggtaaatgactggagtcttagtatcaacagccgttcgaccaacacgactacaattgctgggacaaaaaagacgtatacttcaccttcaattagtagtaccggaactcatttattaggaactgtttctcagactgtcacccatgacagtgatggtagcaagagcattaccatgagttctgtgttttatatacaggcaacattaagtggtacttattatgattctatatcagcaagtgcgacagtaacgctggatagtattccaagagcatccagtgtatctgcatctaatgtgaatatgggatcggctacaacaattacgattaccagagcttcttcttcctttacgcatacgcttaagtatgcctttggaagtacgagtggaacgattgcaacgaaaacaacctctacttcagtatcttggactccggctctgacacttgcaaatcagataccgaatgcactgacgggaacctgcacgattacctgtgaaacttataatggaagcaccaagattggaagtaagacttgtacactgactctgactgtaccgtcatcggtaaaaccaaccatgacgagcttgactgcaacacgagtggatggagatgttccaagtacgtggggtatttacgtacaaacgaaatcaaaagtaacacttgcaattacgggagctgcaggaagttatggttcgactatttcttcgtattcgattaccggaggaggttttaccagcaccgcttccagcttcacaaccgggttcttaaatacatccggtacgatcacttttacagcaacagtaacagattcacgtggcagggtttctacagctaagacagtttctattaccgtacaggcctactcaccacctagttttaccagttacttaagccagcgatgtaccagtggcggtgcggtgaatgatgaggggacgtatgtaagaggattggtttctttttcttattcgacttgtagcagtaaaaatactgtgacaggttcgattcaatataaaaaatcatcagcgacatcctggacttctgcaggggtcgctttttcttcgggaacagcagtgatatttggtggaggagcaatttctacagaaacttcctacgatatcaaatatactttgactgatgcatttacctctgtatccatacaggatattgtttcgactgcagcggtagttatggactttaaagctggaggtaaaggggtcgcagtcgggaaagttgcagagaacgataatatgtttgaagtttccgaagattgggatgtaaaagtgtatgggaaattgctgaaagattatattcagagtttgacttctgcgatatatccggttggcagtatttatatgagcgtcagttccacaaacccttctacctattttggtggaacgtgggttgcatggggaagcggacgagttccggttggtatcaatacttcggatactaatttttctacagtagaaaaaacaggtggtgcatctacggtaacacttaccacatcgcagatgccatctcatactcatacatttacaggtagctctgcgaccacagatagtaaaggggcgcatacccataccttaaatttaaataaaacagcttggtctggttctagttccagccgagttgtagttgatagtaccgactatacagcacttacgaataataagacttcaagtaatggagcgcatacacattcagtcacagccaaaggtacaaatgcaagtaccggaggcggtggatcacacacaaatttacagccgtacattgtctgctatatgtggaaacgtacggcttaaattatatcaaaatgaaagcgaggattataatatgaaggtttttactgaaattgtccattacgcatgggcattaatgggaggttttgtaggatggtttctgggaggctttgatggtttcttatatgcacttttagtgtttgtcatcattgattatctgacaggtgttatggtggcagttttggaaaagaaggtatccagttctgtaggttttagagggatttttaagaagattttgattttctgcttagtggcgattgggcacatcatcgatacgcaggttatccagaatggcagtgtacttcgtacagcagtgatctttttctacttatccaatgaggggatttccatcttagaaaatgtggcactcatcggacttccggtgccggagcagcttaaggcagtattacagcagttaagggatgaaaagaatagcgagaaatagcaggtgctttcgggcacctgtttctttttgcagaaaggatgattgtatatgaaattaattgaatttattatgaaaaacaatccgtgttataaagctgggaaaaagattacagtaaagggtcttatgcttcattctgtaggatgtccacagccaaaggcatccgtttttattaattcatggaataaagcaagctacaataatgcttgtgtccatgcctttattgatggaaatgatggaacggtatatcagacacttccttggaattatcgtggatggcattgtgcttctggtaaaaatggaagtggaaataatactcatatcggagttgaaatgtgtgagccagcttgtatcaaatatacaggtggttcgtcattcacttgttctgataaagctacagcaagagccgtagtaaagagaacctatcagtcagcagtagaattgttcgctatgctttgtaaaacgtataatttgaatccaacagctgatggcgtgatcattagtcatagtgaaggatacaaaagagggattgcatctaaccatggtgatccggaacatctttggagaggactgggactttcctatacaatggctggtttccgaaaagatgttaaaaaggcaatggaaggaaccacttcttctgatacagagggaacagctatcatgggaaccgcagtagctacgacaaaacagatgcaggagtatatcaagaaggtaaatccaaatgtagcacagtctgttattgatatgattccgttatatctttccgaaggaaaaacagaaggtgttcgtggcgatatcgcttttgcacagtcctgtttggagactggtaattttggcttttctcagtcagcggtaactttggatcagaacaattttgccggaatgggagtaacgcagaatggaatgaaagggttgtcttttgagacaccacagcttggtatccgatgtcagattcagcatctgaaagcctacgcttctacagatgcgttgaagaatgaaaatatcgatcctcgctttaaatatgtaacaagaggttccgctccttatgtggaatggcttggcatacaggaaaatccaaaaggtctcggttgggctgcaggtgcagggtacggtgaaaaaattctttctatattaagtaagattacaggtacatccgtttctgcagaaacaatccagactgtgaaagctatgaacggatacgtagaagtaatctacagaggttctgatggattgaatgtgagaaagagtccagctatgggagataacgtggagcaggtgatctatggtggtatttatacagttactggcattagtgcagacgggcagtggtaccgattgaaatctggtggttatatcacaacaaacaaaaaatatgtttcttataggaaggaactcgaatccaatgtaggtttcaaaccatacaaagtgcgagttgcgattgctgatctcaatatcagaaaaggtccgggtacgaactatgcaaagactggaaagtatactggaaaaggtacgttcacgattgtagaagaaaaaatcggacaaggttctaccaaaggatggggaaaactgaaaagcaaagcaggatggattgctcttgattatacaacaagatgttaatatcagccgggtggatgattctgcccggcattctttttttgatgtaaaaaattcaccgagaaataagacttaaatttggtggatatataagtggataattagaagattttatggctatatagtagtacgaaaacgaaaggagacagaagatatgcagataaaagtaatagaaccgaaacagcgtatcaaggcgaagattcgtgtatgtgcatactgtagagtatctacggaagcagatgaacaggaaaattcgctgacgaaccagaaagaatattacgaaaatctgatccgttcaaatccgtcttatgaatatgtagatgtctattatgattttggtatttccggttttaaagaaagccgtccgggattccagaaaatgatggaagatgcaagagcaggaaagatagatcttatcttaacaaaatccatatcgagaatggcaagaaataccgtcacgatgcttaaggcagtccgagaactgcaaagcatgggtgtcggtattttttttgaacttcagaatatgaatacgctttctggagaaggtgaacttatgctttccatctactctgcttttgcacaggcagagagcgatgacagtagtaagaacgcatacatgacttttcagagaaaattcaaagaaggggttccagcagttcagttcgatagatgttttggctttcgcttagacagcgaaggaaatccagcgattgatgagagagaagcctttgtagtgcgtaagatttttaagctggcacacgaggggattgcaccgacaagaattgccactcatttgaatgaaatgggaatcagaaccaagacaggcaagcgatgggacgctacaggagtattcagaacacttcgaaacgaaaaatataaaggcgatgtcatgatgcagaagacttatcttgatgccgatcgagtgagacataagaataccggggaaaaggatagatattacattgcagataatcatcctgcccttgtggatgctgatgtttggaatgaagtgcaggagattttagatgataagtcactggtatgtaaagagaagaaagaacctaaaaaaatgggtggaaactctcataatacttatccgttatcgagaatgctttattgcccgaagtgtggagcaaccttgcatcataaggtgagtaacggtggcaggcagatttattggggatgtagcacaacaatcaaaaaggggagagataagtgttctggaatctttgtgccggaggaagttgcaaacgaatggcaggttagcgaacccagcacggtttttgtaaaagaagatcagtttggaagaaaaagctacagtttcatgaagaaaacagattatgaaaaacagaaaaattgtccatacaaacctaaagttcgaacaacaagagactctcatagcacctatccattaagcggaagactttattgtcccagatgtggaagcgtgatgcatcaccaatgggcatggaacggtaaagaattctggtggtgcagtaaaagagtcaaggatggagaatcagcctgtgagggtgtcagagttccagccgagattgcagatgcatggcaatttgatggttgcgtttatgtattgaaaggagaagatgagaatgggaaaatcagttacagttatcaaagcaagtcctaagacagtcagtaaatccaaaagcggtgtaaagaaattaagggttgctgcatactgtcgagtatcgactgaccaagaggaacagctgaacagttttgaaaaccaagttagttattatacagcttacatcaatggaaaaccggaatatgaaatggcaggcatttatgcggatgaaggtatttctggaacttccacaagaaaaagaacagatttcaacagaatgatttctgattgcgaaagaggtaagattgaccttatcattgtaaaatccatcagccgatttgccagaaacacgcaggactgcctcagttattcaagaaaattgaagaacatgggaatcggagtattctttgaaaaagaaaatatcaacacgatggatggagccggagaacttctttttacgattttgagttcccttgcacaggaagaaagccgatccatttcggaaaactgcaaatggggcattcgtaagaaattcagtgatgggaaatatcacctcaataccaaccgcttcttaggatatgataaagatgaaaaaggaaacctcattataaatgaagaacaagcagtcacggtcagaagagtttataaagagttcatggatggggtaaacccggacatcattaccaaaaggctgaacgatgaaaaagttcccggatgtatgggagagcctagatggtcatgtagtaccatttggggaattcttactaatgaaaagtatatgggcgatgcgattctgcagaagacttacacttccgattttcttacaaagaaaacggaaaagaacaccgggcagattacacagtattatgtagaaaatgatcatgaaccaatcatagaaaaagatttctggaatgcagttcaaatggaagtgcaaagacgtaaagaattcatggaaacgcataacctgcgaacgatgggaagatatactgatgaacaaccattctcaagcagagtcttatgcggtacctgcggaaccatcttctggagaagaacattgacaagaaacgggaagcatataaaggtgtggatgtgtagtcagcgataccgccagaaaggtgtggtgggatgcagcagtgagaccttaaaagaagatgctctccataacacttttataaaagcatggaacggtatcattgaaaaccgaagcaagtatgtagaaagatggaaaaatgatatgagaggagataatccgcttctggcattccgagcaaagcagatgttagagcttacgaagggaaagcctatgaagaaaatagacatggctctggtgggaaaagttttagaaagatgcgtggtgctttctccggaggtaatggagatttacttccttgatggaacttgcgtaaaaatagcatagtaagaaaaatacttagctggcagatcagaatttggtttgccagttttttaaaattgtagaaattttttgacacaatttctacatattataatatgtagaaactcggttaaaaattacatattacgaagcatgctttcagtagtttatctatagaataattttgacaacgtgatatactaaagtggtacgaagtattgagaggtgcaatcaaatgaatataaaaaaagtagttggaatatctgtaagtgcaattgctgcaggaattgggatatataagttggctactggtggtgagccagaaaaatatagtagtaagtggtttgaaaatgcgtcagatgaactgttgaaggcagagcgagaagtagttagaaaaaattattgtgcttccggtgatgatttttctgcagctgtgcgttgggaaaaattattacactattttgataaagtgattagtaaaagagcgtgggcaggaaaagaatatggatttcctgtacgtagtgaacacggatggcatttgccaagtgacgattaggttttaggtctattaaataatttaaaaaacgtatcgacaagggagatcatatatggaaaaaatattctgggtgagaagcgaagattatgatgggaaaattgatgatggattaaaagaagtcaattcatttttagaacaaggttggaaagttaaaatgatttctgcatgttcaatgggagatgctattacatctggtcaagcatacatagttcttgagaaagaataagtgagaaaaatttgaatttgtagaactaacaaaatatttaaaaaagctattgactcctacgttgcgtaatagtttagagtatacttatcgagaggagggaaaagccaatgatgacagtaaatgaagtaagcaaattgaccggagtgagtatacgcactctgcaatattatgataccataggactcctgccaccgactgaatatacagaggcaggatatcgactgtatgacgatacagcaatggaaaggctgcaacaaattctactgtttaaagaacttgaattcccactaaaggaaattaagacgataattgatgcacccaattttgatagaagcaaagcgttggagcaacaaattgagttgcttactatgaaaaaagagcatcttgaagttcttattaatttcgctcgtaaaataaaaacgacaggagtgaataaaatggattttaaagtatttgatacaacaagaatggatgagtatgccagaaaggcaaaagagcaatggggacagacttcagaatataaggaatatgaagaaaatgcaaacaatcagtctccagacgcacaaaaaatggcttggaaaaacctcatgcttatatttgtagagtttggaaaaatgaaagataaggaaccggagcatgcggaagtacagtttgaagttaagaaactgcaagactatatttcggagcatttttataaatgctctaatgaggttttaaaggggcttggtgcaatgtatgcttctggtggagaatttactgaaaatatcgataaagctgctggaagaggaactgctgtatttgtggcaaaagcaatagagatttattgtagttaatataggtaattaagattagcagacccctgttagggtgaacagaaaattccagttttcgcatttctttaacaattaaatatcgtgataaaagtgatacccgattgagaaaataatgactcagtcgggtatttttgtgggggatatagggggatagttcatcaagaaatcagactacgtggataaaataggggataataatttgacgaaaatactatatatagtgcacaggtggataaacactatactagattttgcgatttagtagctgtttcatcgttagtcgggtgtcctctttttagatgaactccctgaatttaaaaaaggtgtccttgaggtgctgagacagccgttggagcagcattgcattcgtattacaagaaattatggcacatatacctttccggcagattttatgctggtggcggcaatgaatccctgtccgtgcgggtgctatccgaatctggaacgatgtacctgtacgcctgcacagatccaggcttatctcggaaagatcagccagccctttttagaccggatcgatctgtgtgtggaggcagggagagttgattatgagaatctgacagaacagaaaaaaggagaagcatcagcggagatcaggatgcgggtctgcagggtgagaaatcttcagaaagagcggtatgaagggaagaagatcagaagaaatacacagcttgagggggagctgctgaaaaaatactgtgcattgggaaccaaagaagaagctatgatgcgtcaggcatttgaacggttcagcctgacggcaagatcctatcaccggattctgcgggttgcaagaacgatcgcagatctggatggcagggaaaaaatcagcgaggaacatctgagtgaagctttaggatatcgcatggttgacaaaaaatactggggcagatagaaggcagagaaaagggaagagaacctgtgtggaaagcggaatggaacgagaaagaaaatagaaagaaatcagaaagaacaataaaaaagaacaataaaaaagaacaaaagaaaggagcagggatatgggacaggaaaaatatgaggtatggtttgcagggatacggggacttggtgcaagaaaaaaatatttgcttcatgaagctctgaaatcgtgcagaaatgcatattatatagaagaaacgcagttgaaaaaattcccttttctgacagaaaaggacggtcaggaaatccggcaggcacaaaagaggaaagatccggagaaaatctgcgaggaaatgaagaaaaaaggaatccgtataatcccgtattattcagaaaaatatccgccaaaattacttcagcttgcggactttccatttgcattattcgtgaaaggaaaacttccgggaaaagatactgagaaggcagcgatcataggagcgaggaactgcaccgcttacggagaaaaatatgcagtagaatatggaagaaagctggcacaggcaggagtcgatgtcatcagcggactggcaagaggaattgatggaatgggccatcgtggtgcgttgatggagaaggggaaaacgtttgcagttctgggctgtggtgtggatatctgttacccgagagaacatattggtctgtatatggatattctggagcagggaggtgggatcttgtctgaatttccacccggtacgccgccgctggctgtcaatttcccgctcaggaaccggatcatcagcggtctgtctgatgtgatccttatcatggaggcaagagaacggagtggttcactcatcacagccgacctggcactggaacaggggaaggaggtttatgctctgcccggaccggtagacagtccgctcagtaccggctgtaaccggctgatccaacagggggccggtgtactcctgtcagccgaaaacctgctgaatgaatggggaattatgccggataatttgtgcagaaagacggagataaaacctgataaaaataaaaaaacgcttgaaagtgaagatgaattggtgtatagttgtgtcggtctgtatccaaagaatgtggaacatttagtgctggagacaggactggaaatcaggaaactgatgcgtgttctggtatctttggagttacagggatatataaaagaagtttcaaagaattattatatcagaaggtagaagaaagaatacttctgccggatggaggaagtagatttatggcacattatcttgtaatcgtggagtctcctgcaaaggtaaagacaattaagaaattccttggaagtaattataccgtgacggcttctcagggacatgtaagggatcttccgaaaagtcagcttggaattgacgtagacaatgactacgaaccaaaatatattacaatccgtgggaaaggagatatccttgcaacgctcagaaaagaagcaaaaaagtcagataaagtctttcttgcaaccgaccctgaccgtgagggagaagctatttcgtggcatcttgccacagcattgaagctggacgaaaagaagatgcggcgtatcacatttaacgagattacgaaaaatgcagtaaaggcatcattgaaaaatccaagagatattgatatgaacctggtagatgcccagcaggcaagaagagagctggaccgtatggtgggatataagatcagtccgctgctctgggcgaaagtgaaaagaggtctgagtgcaggaagagtccagtcagtgacacttcgcattattgcagaccgtgaagcagagatcgatgcatttattcctgaagaatactggtcgctggaggcagttcttaaggtaaaaggcgaaagacgtccactgacggcaaagttctacggaactgagaaagaaaaaatgacgattcattctaaaaaggaaatggatgagattctgaaagctctggaaaatgcagagtttcagattacggatattaaaaagagtgagcggatccgcaaggcaccgttaccgtttacgaccagtaccttgcagcaggaggcagcaaaggctctgaattttggaacgcagaagacgatgcgtattgcacagcaattatacgaaggtgtggatatcaagggcagtggaaccgtaggtatcattacctatctgcgtacggattcgacacgtatttcggatgaggcagatgctgcagcaagaggatatatcggttcggtttacggagcggaatatgtggctgcaggaaatcagatcaaaaatgatggaaagaagatccaggatgcccatgaagcaatccgtccgactgatatttccaggacaccggcggcaataaaagagtctcttacgagagatcagttccgtctgtatcaactgatatggaaacgttttacggcaagccgtatgcagccggcacgttatgagacaacggcggttaagatcggggcagcaggttattgctttaccgttgcaacttcaaaagtagcttttgacggattccgctgcgtctatacagaagcagaggaagagaaagaggagagcaatgttcttgtcggaaatctgagtatggattcagtactgacaagagaagagtttgagccaaagcagcattttacccagccgccggcacattatacggaggcaagtcttgtaaagacactggaagaactggggattggacgacctagtacttatgctccgacgatctctctgattctgggaagacgctatgtgacaaaagagggaaaaaatctctacatgaccgagatcggggaagttgtcaataatatgatgaaacagtctttccctagtattgtggatgtgcatttcacagcaaatatggaagggcttctggatatggttgaagagggaaaagtaccgtggaaagaagtcatccgtaatttctacccggatctggacgaagctgtgcagaaagcagaaaaagagctggagagtgtgaagatcgaggatgaggtgactgatgtagtctgtgaggaatgtggacgaaatatggtcatcaagtatggaccgcatggaaaattccttgcctgcccgggattcccggaatgcagaaatacgaagccgtatctggaaaaaatcggagtaccatgtccgatatgcggaaaagatgtcgtgatccgcaagacgaaaaagggaagaagatattacggctgtgagaataatccggaatgtgaatttatgtcatggcagaagccgtcgaaagaaaagtgtccacagtgtggtggatatatggttgaaaagggaaataagcttgtatgtgcagatgagcagtgtggttatgtaacaagtctgaaaaaagagcaggatcatgcgtaaattacattgatgttttcagaattgtatgataatatagacttgcttacaaaattttttgcatttgtatatacaacttagaattgtggaggagacaatgagcgtacaattattggataagaccagaaagattaataaacttttgcataataataattccagcaaagtagtgtttaatgatatctgtgccgtcctgacggagattcttgactccaatgtactggttgtcagtaagaaaggaaagattctgggagtcagcaagtgtgatcatgtcagagagattcatgaactgatcaccgaggcagtcggatcgcatattgacagtatgctcaatgagcgtcttttaagcgtcctgtctaccaaggaaaatgtaaatcttgagactctgggattttctgctgatgcagtagagggatgtcaggcgatcattacaccgattgatattgcgggagaaagacttggtacattatttatttataagcaggatgctacctattccattgatgatattattctcagcgagtatggcactgcggttgtcggacttgagatgcttcgttcagtgaatgaagaaagtgctgaagagacgagaaaagaacatgttgtccaggctgcgatcagtaccctttcattttcagaactggaagcgatcatccatatttttaaagagctgaacggaacagaggggattctggttgcaagcaaagtggctgaccgtgtaggaattacccgttccgtgattgtgaatgcactgcgtaagtttgaaagtgcgggtgtgatcgagtcccggtcttccggtatgaaaggaacttacatcaaagtactgaacgattatgtatttacagaactggaacggattgagaaagagcggatgtattaggaaggaaagacagctatgtatgagggaaatcctgttgatctgcaaatggaaaaagtgatatctgcggatggaatttttgacgacacaacacgagcctgccgggtatataagtatgatatcgaggacgaatacatttatcttgaattgaaagaggatgaactgacagcgattctgctggatgcaaagtaccggtgttatatttccacgaagacggaacttttgtgctgttccggtgtcgtaaaagagagataccggtcagagggaatcaatctcttaaagttccgcattgagaatggattttataatatctacgaagaccgccgggcaacgagacacatataagaaaccccataaaaggcataaaagaacgtaaagaagagctacaggaaagaacctgtggctcttttctggttgaataaacccggcaggttgcattcgtgcaggtacgatacaggaaggaatctaaaaaaaatctaaactaggttgacaaatgggaagtggagtgctattttatattcatgggttagcactcgagcgaaaagagtgctaataagctgaatatcaaggaggaattacaatgaaattagtaccattaggtgacaagatcgttttaaagcagttagaagcagaagagactacaaagtccggtatcgtattaccgggacaggcgaaagagaagccgcaggaggcagaagttatcgctgtgggacctggcggtaatatagatggaaaagaagttgtaatgcaggtaaaggtcggagataaagttatttattccaagtatgccggaacagatgttgagctggatggcgaggaatatatcatcgttaagcagaatgatattcttgcaatcgttgagtaaagtacattcagagccggagaaatcctgagaagaatggcaggcagatctgaagaacaggaacagatcagagaagcatagatagatgatagatcgaaaagaatgaaaaggagatgcagtgagatggcaaaggaaattaaatatggctcagaagccagagcagcacttgaaaaaggtgtaaaccagttggcagatacagtaaaagttacgttaggaccaaaaggaagaaatgttgtccttgataaatctttcggagcaccactgatcaccaatgacggtgttacgatcgcaaaagagatcgagctggaagatggatttgagaatatgggagcacagttgatcagagaggttgcatccaagaccaatgatgttgccggagatggtactacaacagctacggtactggcacaggcaatggtccatgagggaatgaagaacctggaggccggagcaaacccgattgttttaagaaagggaatgaagaaggcaacagataaagcagtagaagccatccgtgagatgagcagcaaggtaaacggaaaagagcagatcgcaagagttgcagccgtatcttcaggagatgatgcagttggacagatggtagcagatgcgatggaaaaagtatccaacgatggtgtgattacgatcgaggagtccaagactatgcagacagaactggatcttgtagaaggtatgcagtttgaccgcggatatatttcagcttatatggcaaccgatatggagaagatggaagcagttcttgatgatccatatatcctgatcacagataagaagatttccaatattcaggagatccttccacttctggagcaggttgtacagtcaggagcaagacttcttatcatcgctgaggatatcgaaggtgaagctcttacaaccctgatcgtgaacaaactgcgtggaacattcaacgtagtagctgtaaaagctccgggatatggcgacagaagaaaagaaatgctgcaggatatcgctatcctgacaggcggacaggtgatctcagaagagcttggatttgacctgaaagagacgacaatggatcagcttggccgtgcaaaatctgtaaaagtacagaaagagaatacagtaatcgttgatggttgtggagataagaatgcaattgaagaccgtgttgcacagatcaagaaagctcttgaagagacaacttctgaatttgataaagaaaaacttcaggaaagacttgcaaaactggcaggcggagttgcagtgatccgtgtcggtgcagcaacagagactgagatgaaagaagcaaagctccgtatggaggacgcactgaatgccacaagagcagcagtagaagaaggaattatcggtggaggcggttcagcatacattcacgcttccaaagaagtgaagaagtttgctgatgaacttgaaggcgatgagaagacaggtgcgaacatcatcctgaaagctctggaagctccactgtatcagatcgcaaagaatgcgggacttgagggtgcagttattgtaaataaagtaagagagtctgagcctggcacaggatttgatgcttataatgagaagtatgtcaatatggttgagaagggaatccttgatcctgcaaaggtaacaagaagtgctcttcagaacgcaacaagtgttgcatctactctgctgacaacagagtcagttgtggcaacgatcaaagaagatgctcctgctatgccggctggcggtgcaggcggaatgggtataatgtaatcagcgttcatcatcctgttgagaaccgaaaaagaaaatggggtgcggaaatgtgcagacgtttccgcacttttttattatacaagtactttcggaataaaaagtgcttttcgggggcagttataagcagaagttaataatactatttaacataaatcaacaggattgactttgtcgaagttttaaagttcttgacaactgatctgaatttaggtactataacaggtaacaatcactaatatttggatcttataaggaaagagaggtatttgcataatgggaaaaattattggagaaggtattacatttgatgatgttcttcttgtacctgcgtattcggaagtaatcccgaatcaggtcgatctttcaacatatctgacgaagaagatcagactgaacatcccgatgatgagtgccggaatggatacagttacagaacaccgcatggcgatcgcaatggcacgtcaggggggaattggtatcattcataagaatatgtcaatcgaacagcaggcagaagaggtagacaaggtaaagcgttctgagaatggtgttattactgatccgtttttcctttctccggagcatacactggaggatgcaaatgatctgatggcgaagttccgcatttcaggagttccgatcacagagggacgtaagcttgtaggaatcattacgaaccgtgacctcaagtttgagacagatttttccaaaaagatcaaagagtccatgacttcagaaggactggtcacagccaaagagggaattactcttgaagaggcaaagaagatccttgcaaaggcaagaaaagaaaagctcccgatcgtagatgatgaaggcaatttaaaggggcttatcacgatcaaagatattgagaagcagatcaaatatccgctttctgcaaaggatgagcagggaagacttctctgtggagcagcagttggtattacggcaaattgcctggatcgtgtagaggcactggtgaaatctcatgtcgatgttgttgttatggactccgcacatggacattccgctaatgtactccgtactgtaagaatggtaaaggatgcatatccggatcttcaggttgttgcaggaaatgttgcgacaggagaagcagcaaaggcattgatcgaggcaggagtagatgccgtgaaagtcggtatcggacctggatcgatctgtacaacccgtatcgttgccggtatcggtgtaccgcaggttacggcagttatggactgctatgctgcggcaaaagagtacggaatcccgatcattgccgatggcggtatcaagtattcaggagatatgacgaaagcgatcgcagccggtgcgaatgtatgtatgatgggaagtatctttgcaggatgtgatgagagcccgggaacgtttgaactttatcaaggaagaaaatataaagtttaccgtggaatgggatccatcgcagcgatggagaacggaagcaaagaccgttatttccaggagaatgcaaagaagctcgtaccggaaggtgtagaaggccgtgtggcatataagggttcagtagaagatactgtcttccagttaatgggtggtcttcgttccggtatgggttactgtggaacgcatacggttgaagaactgaaagagaacggacgttttgtaaagatttcagccgcttctctgaaagagagtcatccgcatgatatccatattacgaaggaagctccgaactacagcgtagatgaataaaagtgtcccccttttgttaggcaaaaaagtctaatgaaaggggttatttttttagttgtttagttttaaaaagaaagtcctaagattttattcagaatcctttagaaaagctatgctataatgaacaatatgtaaagaagttgtgtgaagacaaaagatttttatatatgaggtacggaatatggcacaaggaaacagaagagatgaaaaaatgagatcggacagaggagaatgggacaggaaaagaacgggttctggaaatacagataaaagaaaaaagaacagaaggagcagaccttcggggagagaaagaagagcggtgaaaaaataccgcctgatccgtagcggagtgttgctgctgtttttgttgacagtggttcttctgcttcgttcgtgtatcagaaaagtcagaggaacagacagtatgtcatccgattacggaacggtcaacgtggatgcgtcagagccggtgattgatgtgcagcttctggatgtaaatccatattcaagacccggcacaacgattgatgagattcatgggattgtgatccattatacagcaaatccaggaagtacggcacaggagaacagggattattttaatgggttgaaggacagccatgagacagaggccagtagcaattttgtggtcggactggaaggggagatcatccagtgtgtgccaacatgggagatgcttatgcatcaaatgaacggaatgaggatacggtatccattgagtgctgccatccggataaaacaggaaagtttacaaaagaaacttatcagtcgatggttcagcttacagcatggctgtgtaaaaaatataatctgaatgaggatcaggtcattcgtcattatgatgtgaccgggaaaatctgtccgaaatattttgtggaagatgaagctgcgtgggaacagtttaaaaataatataaggaaggcacttgaagaataatcgaaaaaccttgctatcccacttttgaattgctataataaagtggattgtgcgacgaaaaaagattttagcggaaaatctgtaagaagcataaagaagtgtggaggttttaggatgaacgatctggaaatgtaccgcgagcagcttgcattatgtgatgataagatcattgatgcactcgtggagagaaatgccattatcgagaagatcatggcttataaagaaacttatggtatgccgattctccagccggctcaggaagccaagcaggaacgcagactgaacgagaagctgaaagataataaatatcaggatgagatccatgatgtatttaagcggatcttaaggaatagtaagagaatccaggcaagaaagctcttctcatataatattgttctgattggatttatgggagcaggaaaatccacgatttccgattacttaagcaccatgttcgacatgaaactggtggagatggatcaggagatcgtagaacgtgaagagatgagtatcccggatatttttgctacttacggagaagaatatttccgtaatcttgagacaaatcttctcaaagaactgcaggagggtgagaactgcattatttcctgtggtggtggtgttgccatgcgtgagcagaatgtagtcgagatgaagaagaacggaagagtcgttctgcttacggcaagtcctgagacaatttatgaacgtgtcaaggacagcaacgacagaccgatcctgaatggaaataaaaatgttacgtttattgcagatatgatggagaagcgtcgtgagaaatatgaagcggcagcggatgttgtgatccagacagataataagtcgattcttgagatcagtgaagagcttatctcaaagcttacggagttagatgaagagaatgtttgatcgattttttccggatgaatatatggaatcaacatacagtattccatttgaaaagctgtatcaggaagggtacagaggtgtaattttcgatattgacaatacactggttccgcatggtgctccggcagatgaacgggcaaagcagttgttcagacgtttgaaagagatcgggtttgagtcctgtctgttgtcgaataaccaaaagaagcgggttgagatgttcaatcaggatgtagggacgcattatatttttaatgcacataagcctgctacaggtaattataagcgtgcgatggaactgatggggacagatctgtccagtacaatatttgtcggagatcagctttttacggatgtgtggggagcaaaaagagccgggattcataatattcttgtgcagcctatgaatccgaaagaagagatccagattgtgttaaaacggtatctggagaagattgtattgcatttttatgaaaaagaatgcagataaatgcatttaagatggggcaacctgcaaaaaaggattgaaaaaagtagaaaattagtataaaatggtatgagcgaatgcctgaatgataagttattgaaggaggattatacatggtttcagcaggagattttaagaacggtattacaatcgagattgaaggaaatatttatcagattatggagttccagcacgtaaagcctggaaagggtgctgctttcgtaagaacaaaattaaagaatatcatcagtggaggagttgttgagaagacattccgtcctacagagaaatttgagaatgctcatattgagagaaaagatatgcagtatctgtatcaggatggagatctctataacttcatggatatggagacatatgatcagatcgcactgaactcagatgttgttggtgacgcactgaagttcgtaaaagagaatgagacagttaagatctgttcccacaatggaaatgtattttctgtagagccaccgctgttcgtagagttggcgattacagagacagagcctggattcaagggtgatacagcacagggtgctacaaagcctgcaatcgtagagacaggtgctaccgttatggttccgctgttcgttgagacaggagatgttctgaaaatcgatacacgtactggagagtatctctcaagagtataatccggatattcataattagtcagagtcgtatacatgagatgttcatgtctgcggctctttttttatatatttttaattagtttggaaagttttaataatttttatgttgcggtcaggtggacggtcgcatataataaatagcacataatattgtttcaattcataaatcgaatcagtcaggtacggatcgtaccgaatttcattcaaaaatcagtggaccgcagtcggaaaggagaaaggtgaattatacagaatttgtacatgcggttgaaactatgataaaccagagaaaagaaggaggtctgaaagcgacagtttatacagcagtgaagaataacgatacacggaggacaggtgtgatccttgaaactccgggaatcaatctttcaccgacgatttatttagaagaattttatgaaagttatctcggaggaaagacgatcaatgagatcgtggacgagctgttggagacttatgaaaaaattaaaaaagatgaatcctgggattatgaaaagatttttgattttcaaaaggtcagagaaagaattgtatacaggcttgtcaatactgaaaaaaatgaacagatgcttcaggatgttccgcacagggaaattctggatctgtcattgatctattatgttctgctgaatgcaagtgaaaaggggactacggctatgctgatcagcgacaggcatatggatcagtggaagacgacagaggaaatactctggagtgaagcggacaggaatacaaggcggctgcttatggcagagtgctttacaatgcagtatgccatgagtgaactgctgggggctgccggaaaagaggcacgcagagagcagaatctcctggaaagtgaagagaagggagaagataaaatgtatgtcctgtcgaaccgtgcaagaagcaacggagcagcctgcatgatctatccttatgtgttaagaatgatgggtgatattttagaggaagatttttatatacttccaagcagcatccatgaggtgatcctggttccggcttcagcagggatcagtgtggcggagatggaaaaaatggtctgcgagatcaatgagacgcaggtaccggaagaagaaatccttggaagtcatgtataccggtacagcagaaaaaataagaccatcagcatgggtggaaaagcatatcaggtaaaggaggagacgaaatgagaaaaaaggggaaatttcatggaagtcttctctcggcggtgatgatcctggtgattctgtttacggcactgggagagaaaggcatttcggcaaaagcggaaacttcagaaaaagaagaggtgaaggagcagattgaagaaaaaaggaaccggatcaggaatgcttattttcctgaagcggatgtagcagaccggtcagcgaaagaggatgtggctgttcagtcggcggaagaagcgaagacggtttatgtagaatgtggcagagttatctattattcaggctattctaccaattattttgaggcggaagggaacagtgcatggtgtttagaaccggcaagaggtactccgcagagtggaaattatacagcagtaaaactggaaaatacttctgatcttgcaagggcattatattattctgttgctgctcccggtgaagcggcactgtatcaatggtacggaagtgaagggtactggcagatcggggatgtaaagcagggggcggcagtggcaggttttgatgagagatattgctacagccatatgttcttgtcgtgggtctataatgcgtttgactttgatgtcgctttttatggaacgaatctgaaaaggcaggaatactacgaagatctgaagaaagcatttcaaaagaaactggaagagatcagggcattggctgtaccggatcagggattttgtgcatacgtcatcaacggaggaaacggaaagcaggtcatgggtggctggacttatgttccgcatggaaaagcaaaactgaagaaaagttcaaaagagccgcaggtgacagagcagaatccggcatatcgtttaaacggagcggtttacggagtctatactgatgccgggtgtaaaaatctgacaggaacgcttacaaccgatgaaaatggaatgacgcaagaactgacggtcagtccgggacaatattatataaaagagaaaagttgtccgacaggttatgcactggatgatacagtttatccgatctgcgttttatccggtcagacggcgatgatagaagtcagtgatataccgcagaaaaatccagtcagtcttattctgcaaaaaaaggatgccgatacagggaaatgtgaagcttcaggtcatgcgacactggaaggagcagaatttgaaatcagatactataaaggactgtatgaggaagatcctgcaaaaaaaggaatgaaagccgaaagaatctggctcatgcggacagatgcttcaggaaagatcacttttgattcggagcataaggtcagtggcgatgcattttttgaactgtcagatggggaagcagcgtttccacttgggacagtgacgatcagggaaacgaaagcaccggatggatatctgacagaagatgaggtagttgtgaggaagattcttccggagggaacagccgaggctgtctgcacttatgaaccggtggaggtcgcagaacaggtgatccggggtgatatcgaactgattaaattcagagaggacacagatcctgaaacagaacacaagactccgctggaagggattgagttttccctgacagcaaaaagtaccggagaagtttttaaaatcgtgacagatgaaaaaggttatgcaacgacaaagcaatcaggagaaaatgcaaggggaaatcttgtctatgatacttatactgtccatgaaataaatcctccgcagggaatgaaaccggtacaggattttgaagtgacgatctctgaggagggacagacattttattatctgctggaggataagcagatcgtttcacccgtcagactggtgaaaaaagatgcagtaacggggaagacgatccgggtaaaaggagcaaaatttgagctgctggacgatgagaaaaaagtgatcaccatgaaaagttattatccggaagagacagagcatacttattttgagaccggtgaagacggaatgtttcttctgccggagaaactgaagcctggtacctattatttcagggagatagaagcaccttatggttatctgctgggagaagatgtggcatttgagatccgggaaggacataactgggcagaaccggttacggtagaattttacgatgaacctttgatgggaaaactggaaataataaagacagatgctgatacaggagacgtactggaaggtgcagagtttgaagttatagcagaaaaagatatcataaccggggacggaaccattcagataaaagccggagagacagccgcagtattgaagacggatgaaaaaggaaaggcagaaagcggactgctctgtcagggaacataccgggtcagagaaatccaggcaccggaaggatatatccgggcagaaaaagaatggatcgtggaactgactaaggatgcagaagatgacgaacagaaagaatttgtcaggaaaatgaggataacgaatcaaaaagagaagatcattgtggaaaaagagaagaaaaaatcaaaaccccagtcagtaaaaaccggggatccatcgcaaatgaaaaagtggatgatgatcgtatcagcagaaagtgtggtattgattctgatgcttctgaccttaactcgaaaaaggaaaaaagggtacaaaaaaagcgtctgagcggagtcgaaccgccgcacatgcctccggagggcatcgctctatccactgagctacagacgcattccgattgtatgatgaaattcatcaacaaccttatttatcctaccataaaataaaagaaaagtaaagggtgaatcttgcttgagtttccgcagttttatccacagacctctgatttttctccattcattataaacaactttatgaaaatgcccaaaatataaggaatctaacttctttttgatgtaaaattaagctaccaaacaaaaaccttactaaacaaaaaagaaggagattccctatggctaattttacatcaaatacttacactttgaaacgaaaaattttaactttttcaaataaaatt

SEQ ID NO: 36 - DNA, 124987 bp, Mediterraneibacter lactaris
aactgaaataccttctgctttgagtagtaaaattcttgcccgaattactgtctgggcttgaattgttcttgcacgcatctgagtttcaagatataaacgttcgtcctcgctaagattaatagtggatgcttttcttcccatagtttaatgctccttttgatttgatgagaacagtatactacagaaaagaaatatagtccatttatttaaaaacttttgtaatagtgcagtaacggatgctcaggaagcctttgctgccgcaaagaagactgctgcggagaatgagcagaaggcacagaaaagctacgatacctcagccgctgaccgtctggcagcagaagatgctgtacgtctggcaaatgcagcatatcagcaggcagcagccgagaagcaggcagctgaaaaagccatgcgggaagctgaggacagaatttctgtaactggagcggacgttaccgctaaaaagaatactttagattctgcacaggcagaactttcagaaaagcagaaggcagcagaagatgctcagactgcactcgatcagttgaaggctgacatcaattccagtgatgaaaaaattgcggagcttaacaccaaattgcaggaagcaaaaagtgccttagatgcatcccggcaaaaagtaactactgcacagcaggcttaccttgatgcacaaaattcctataatcaggccaaagcagatgcagaagccggctctgctgaactttcagcagcacagaaaaaagtggaagatgctcagactgcactcgacgaagcaaagcagaatcaggaacgtttaaattccactcttgctgctgcacagcaggaactgacagagcttgagaatcagatcagtgaggcttcatctgaactggaaagagccgatttggaaaaaaggattgtccaggctcagtatcaggtggcagttgcacaggaagagctgaccgctgccaatgctgatgttgcagcgaaacagtctgaccttgatgtcgcaaatgcaagggtcacagaactggaagcaatattaaatgaaaagcagacagccgtaaacgaaaccaacaccctctatcttcaggctcaggatgcatacaatactgccaatacagaaaaagatgcggcagtacagcagcagactgaaatggaaactgcatataataatgctgtcaccctgaagaacaatgcagcccagcttcaggaagacgcagaaaccgcattaactgctgcacagacgcaggtttcctctgctcaggcagcttataatgctgccaaaacggctcttcaagatgctcaggcagcttatgatactgccaaggcagctgcttcctctgtcagtgaacagattgcaaagggttcttccggattcttcgaggaaaatggcagcacgtctgcactccaggtatttcaggatgaagcatacagccagtatacccatatgggagaggcgaaagatgccacttccctggaaaatatgaaaagtacgctcgattatattaaaaaatgtaacgatctccgtaagctgaacggtcggtcggaactgctcattactgattatatgatggcagttgcacagtatgatacaaatgcttctgcttatacaatgaatcatctcgcccactttgctgtcggagagaatctcgcctggggctacaccactccggacagtgtatttggcggctggtatgatcaggaaaaagaacagtatgaaaaggatgggaatgcagctgcagccggtcattatttcaatatcattaatgcaggttataaggtgacaggctttgcactcaaccagtatggctcttacggtcgcacatttggtcagacattttcttctggcacttctcagggtggatatacgctgaaagaatatactgctaaattcatggcatactacaatcgtctgatggaagccccgactctggaagaagctgccaaagccaaactggatgaggcgaaagaaactttggaacaggcccgccttgtactggatactgcacaggcaaatgaaagagcagcttctgaacagttagaccaacggaagcaggaaactgcagatgccacagcagcagaaactgcagccaaaaataatcttgacgctgcaaaagcttccgttactgaaaagacggctcaggtacagactgcagaagaagctatgacgacagcccagacaaactgggaaaatgcaaaggcagaagtctcccaggccagtgatcagctgaacgatgcaagagaagcactcagtggtccatctgccagcctacaggaagcacagcagaatgcagcagcaaaagaaactgcattcaactctgcaaaggaaaattattatacccttggcggcaccgtgaccgaattcccttccaaagaccaggctcaggaaagttataccgcagctcaaacgcgatacaatgaaaaactggctgcaaaagaagcccttgaacagcagaagactgcaaaagaaactgaaattgcaggaatcaatacggagattgaaaatgctgcctcagttgttgctcagaaatccagtgatctcaccacagcccaggaagagagaaataccatagaagcttcgatcagcgagaatctgacaacacttcgtcagacaatggaacagaaagctgctgaatacactacttctcaggaagaagagcaggctgcatccactgcctgcgatcaggcacagaatgcttataatgcagaaatttccaataaggaacagttagacgcagataagaccacagcagaacagctcgtacaggattctcttgctgccgccacagccgctgccgcagcaaaagatacagcacaggcagactatgatcaggcaaaagctgattataatgtattagttgatgcaagaaaagctttagaggatgcccaggcagaagaaagcactgcaaaagaagcttatgatactgcccaggctgcactggatacagcgaccacagacctgcagaatgctcagaacgcactcctggctgctactgatctcagccagagagctggcaatctctcctatgaagacactcttgagaatgaaatcacagacactgactttacatacctgaatgcatctgtagaaaaggtcagagaactgaaagccgcagctcagaatgcagcagatgcttataataccgcataccaggctgttcttgacgctgaggcagttctcaaagaagcgaaaaaggagaatgctgaagccatcgcacagcttgccattgcacaggctgagtatgatgctgaagcgaaagatacagaaaataaagatacggagacaaaaaaaccggaagccaaaaaggatactacagatactacggtagtcaaaaagaccgacaagcagtctgctccggcagcagactgcaggaagacagcttcagccaatacaactccgaaaaccggtgattcttcatcaccctttgcatttgcactggcaggaatagcatccgtttacgccggactggtttcctaccggaaaaagagaaaagacgtataaaaattttataaccaccagaacttaccagtttaaattcaccgttcctccacatactaacatcgtaacaaaggcgaacggaaccagtgatgtatgatgaccggcaaaagcatggtacatacagaaactggccggtcatcttcgttacaacaactcaggaaaagcagtcttcagacagactgcaggatgcaaaaggaggaaatggatcatggcaagtcgttcatctaacaaagcagcagtgcctgaagcaaaaggcgcactcgacaagttcaagtacgaggtagcaacagagctgggagtaccgttgacagacggatacaacggcgacctgacatccaaacagaacggatctgtcggtggatatatggtaaagaaaatgatcgagcagcaggaaaagcagatggcaggaaaataacctgaaaccatcttcccggcttctgcggtcagtgcagtcgtagccgcgacagaccaaatgtacgtcaaaaaatacagcagaagccaaagagaaaagcactcggcattgacccgggtgcttttttctgctaaaattcagcatagttaatgattggaggtgtcgatgaatgagagtaattgccggcagtgccagaagtctgaaactgaagactctggaaggaatagatacaagaccaaccaccgacaggatcaaggagaccctgttcaatatgatcgctccttatctgtatgactgcgaatttctggatctgtttgcgggaagcggagggattgggatcgaggctctcagccgcggagcaaaagaagccgtctttgtagaaaaaaatcccaaagcaatggagtgtatcaaagaaaatttgaagtttaccaggctggagaaaaaggggatcacactgaccaaagatgtgctgaatgcactgtaccagttagaaggagataaggtttttgattatatttttatggatccgccttatgatcaggaactggaaaagcaggtactgaaatatctcgccggttcctcactcgtctatgaagataccgtgatcatcgtagaagcctcactgaatactgatttctcgtatatcggggaacttggcttttctctcatcaaagaaaaaagatataagacgaacaagcacgtctttttggaaaaagccggaaaggaagaaatatgttaagagcgatttatccgggaagctttgacccggttacatacggacattatgatatcatctgcagatcctgtaaaatcgtggacgaactcattgtcggagtattgaataataaagcgaaaatgccgttgttttctgttgaagaacgtgttaaaatgttaaaggaagtgacaaaggatctgccaaatgtcaggatcattccgtttgacggacttctggtggattttgccgaacgaatggacgcagacatggtaataaggggacttcgtgcaattacggattttgagtatgaacttcagatgtctcagacgaatcataaactcagtccgaatgttgaaaccatgtttctgacgaccagtattgaatattcttacctcagttcaactactgtacgggagattgcagcctttggcggagatgttactcaattcgtaccacaggccgttgcagttgagcttgaaaagaagatgaaagaaaaaggagagtgtaactgatgagtagccgcattgaacagatcattgaagagattgaagaatatattgacagagactgtaaatttcagcccctgtcccagaccaagatcattgtaaataaagagcatatggatgagttgctccgtgagcttcgcatgaagactcctgatgagatcaagcgttatcagaagatcatcgcgaaccgggatgcgattttggcagatgcaaaagcaaaagcagatgctatgattgaagaagcacaggtacagaccaccgaactggtcagtgagcatgagatcatgcagcaggcttatgcacaggcaaatgagattgttactcaggcaactgcccaggcacaggagatcatcgacaatgcaaccatggatgccaatgaaatccggattggtgcgatccagtatacagatgaccttcttgcaaatgcggaaagcatcatcggtcatacactggacagctatacaaccaagtatgacggtctgatcaattccctgcaggagtgttatgatacagtccgctccaatcgtgcagaactggatgttcctgaggctgactcttctgattataattatgattctcagaatggctcagaccaataggaaacagggatctattgacatctgatgaaatgaatttaaaaattgaatttcgcatacagtattgcgaatccactggctgccattgcggtagccagtttttgtatgatataatctgaaagtttcagtcctgttccacggatcatcgactgcgtctgtgccatagaacagatgcctcccatagaagtcagcccgatcagcaacggataggctgtgcttatttccgggaatcttttcgcaatcataagaatcccattcgtaacttccagtgttgaaagcaggagagttgcagcgatatttttctgcccggtctgctctgccagttccagtaatacagaaaaaataatcaaatatcccccgactttcacgattgtctcaaagctgtccatcatacaactttctacacttttctttttcataatatagtttctctgcattcccaatgtatttctgcccccacctctttttctgccacttttgtaaattttcctgaaagggaagctcataacaaccggtgttcctaaaagaatcaccaggctcggaagcagaagctcttttctgtccagcgttttccatacaagaaaattcatgatgaaaatcggacttgtattattgcagaaagaaagaagataggttccttcttcgacacttatggactgatttctgattagatctgccgttatttttgctcccatgggatacccgcagagaaatcctgcaaccactgcaaacgagccttccccggaaactcggaataaaattccgaaaggaacagacagtactttcgagatcatcctgatcccgccggttgccatcagaagatctgtgatcagcaggaacgggaacagtgtcgggaataagatctgaaaccataaaaggagtccttcacttgccccgttgaatacttctttcgggcagcagagcatcagcagaaaaactccgatcataccaattcctgccaggctctttttggaaagtttctgcttcatactccacccattctgtcattcctgttcttctttcactattttatgattttcctgaaaaagtatgcagttatccggcttctttggcatatgcattattaacttcttcactgcaaaggaattgaaccaatgactgctgttctttcttcttttcggtcacattttctgaaaaggccatggatcctcctctgttctgttgtatttttctgtggactgttgattcccagactttcatttctcgccagaaagaatcttttaaacccgactaccgttgaaagcaatgaatttcgaagtcagccggtatctgaagaactttttccgatcctcgcatcctctgatgatcccggcaggtttcttggtctctactggcttgagactcggtttcaggcagatcctcacgctcttcgtacctgtcttaccgctttgaatcattcggatgaaccgaccgatttttctgtaaagaaatacgaaccacactgggaaaaccttcctgactggaacgaatacctgaaactctgccgtgccatatggaatgatctccggtattttccggttgctacatcctccgattgtcctgactacaccgtcacctttgaaaattcctggcaatacgaaagaacctatggagggaaacgccgtcatgaaggtatcgacatcatagcctccgttaaccaaagaggtatctatcccatcgtaagtatgaccgatggaacgattcagaatcttggatggctggaacttggcggttaccggattggaatccttgctcccggaggtgcttatttttattatgcacatcttgattcctatgctcctcttacagaagggcagcaggttcatgccggagatctccttgggtatatgggcgataccggatacagtaaaactgaaggaacaaccggcaggtttccggtccatttacacctcgggatttacctgaccgttaatggaagagaagtcagtgttaattcctatccggcacttcgtctgacagaacaatggaaagtgaatgcagtctatgaataactcttttctgaataccggtttcgtggtatactgaatgttatggaaaatttactttgtaaaggagttacaatgaacttaccaaaagaatttgaagaaaaaatgaagactctgctcgggtctgaatatgaagaatataccgcctgctatgatgagccaaggcattatggtctgcgtgtcaatacagccaagatttctgttgaagattttttaaagatcgcaccctggccgctggagccggttccgtggattgagaatggattttactatgacggagatcatatccagccttctaagcacccatattattttgcaggactttactatctgcaggaaccaagtgccatgacccctgccagccgtctgccggtggagccgggggaccgggtactggatgtctgtgccgcaccgggtggaaaagcgacggaactgggagcaaaattacaggggacaggtgtccttgcagccaacgacttaagtagttcccgtgccaaagggcttttaaagaatctggagcttttcggtattggcaatgttctcgtattaagcgaagaacccggcaaattagtttcttattttgaaggttattttgacaagatcctgattgatgctccctgctccggtgagggaatgttccgtaaggataagaaaatggtaaaagcatgggaagagcatggaccgtctttcttttccaaaattcagaaaagcatcatcacccaggctgcacagatgctccgcccgggaggcatgctgctttattcaacctgcactttttcaccggaagagaatgagcagacgattgaatatctgctccaggaatatcctgaatttcagatctgtgaaatggaggggtatgaaggctttgtcaatggaatgccgcaggtgaccgaaagcagaaatgaagagctgaaaaagaccgtccgtattttccctcaccggatgaaaggagagggccatttccttgcccttcttcagaagggagaagcacatccggctcttccttccgggaccgataccggcaagcccaaaaagctgcccgaagaatttacttcatttttaagtcatgtacaccgggagtttcttccttccagaatggaactgcgtggcgataaagtatactatatgccggccgatcttccttccatccggggaatccgttttctacgtaccggactgctgcttggagaactgaaaaagaaccgttttgaaccgagtcaggcttttgccatgaatctgaaaatggaagagtacgatcagatcctcaatcttcctgtcagtgatgagcgagtgatcaaatatctcaaaggtgatactctcgatgtggaagatctggtatctctgaaagagaaaggctggtatcttgtctgtgtagacggatacccgctcggtttcggtaaactgatcaatcagatgctgaaaaataaatatcttcccggatggcggtggaacggatgaaattaagactggataaatatcttgcggatatgggacttggtacaagatctcagattaaaaaagacatctccaaaggacaggtgcttgtcaacggaactgtcagcaaagatgccggaaccaggattgatacagaaaaggatcaggtctcttatcttggacaggctgttacctatgcagagtatgaatactatatgctgaacaaaccggcaggtgttgtttctgcgacagaagaccggcatgaccggaccgttttagacctcatcgatacaaagcagcggaaggatcttttcccggtcggaagactagacaaagataccgagggtcttctgctcatcacgaatgatggtgcgttggctcaccggcttctttctcctaagagccacgtcgacaaagtctactttgcccggattgagggaaaggttactgcagaagatgtgcttctttttcagaaaggtgtagacatcggagagcaggcacttacgcttcccgcacggcttgaaattttaagcagtgataccgtctcagagatccggctgacgatctgcgagggaaagtttcatcaggtcaaacggatgttcgagtcagttggcaagaaagtcctgtatctgaaaaggctttccatgggaacacttattttggatgacttactgccaccgggagcttaccgtacactgactgccggggagatcagaagcttacagacaatatcaaaaaaagaaacaggagataaagaatgaatggtggatttttacctgtcagcagaaaagaaatgaaagaacgtggatgggatcaggtcgattttgtctatatttccggagatgcttatgtagaccatccttcctttggtcatgccatcatcacaaggctgctggaatcccgtggctacagagtgggaatcattgcacagccggactggaagacacctgacagcgtcacggtttttggcgaaccacgtcttggatttcttgtatccgcaggaaatatggattccatggttaaccattattccgtatccaaaaagcgacggaagaccgatgcttacacacccggaggtgttatgggaaagcggccggattatgcctgtgttgtctacgggaatctgatccggcagacttataagaaaactccggtcattctgggtggcatcgaagccagtctgcgaaggatggcacattatgattactggtctgacaaactaaagcgttccattcttttagattccggtgcagatattctgtcctatggaatgggagaacattcgatcattgagattgcagaggcactggatgccggcattccggtggaagagattacctatatcaacggaactgtcgtcaaagcaaagaatctcgacagcgtctacgatgcagagatccttccctcttttgaagagttgaaagcagaccggctgacttatgccagaagcttttatacccagtatcttaatacggatgctttcaacggaaaacgactggtagagccttattctgactacctctatgtggtacagaatccacctgcacttccactgaccgagatagaaatggatgatatctattctctgccttatatgagaacgtatcatccttcctacgaggcacttggcggagttcctgctatctccgagatccggttcagcctcatcagcaaccggggctgttttggcggatgcagtttctgtgcattgacctttcatcagggacggatcatccagacccgcagccaccagtcacttttagatgaagccagacagatcacaaaagaaaaagattttaaaggatacattcatgacgtaggaggaccgactgccaatttccggcatccttcctgtaaaaagcagttaaagtacggtgtctgcaagaaccgccagtgtctgttcccggcaccctgtaaaaatctgaatgcagaccacagtgattatgtccggcttttaaaagaactacgtgcgattccgaaagttaaaaaagtctttatccgctcgggaatccgattcgattatcttttaaaagaagaggacagaacttttttacgggaactttgtaaatatcatgtcagcgggcaattgaaggttgcaccggaacatgttgcagcaccggttctctccctgatgggaaaaccagaacataaagtatatgagcagtttaccgaagaattttataaaatgaacaaaaagatcggaaaagaacagtatcttgttccgtacctgatgtcatcccatcccggttcaacgctgaaagaagcagtagaactggcagaatattgcagggatctcggttatatgccggagcaggtgcaggatttttatccgactccgtccacactttccacctgtatgtattataccggtgttgacccccgtaccatgaagccggtctatgtaccgaagagtccacatgagaaggccatgcagcgtgcattgatccagtatcgcaacccggaactgtacgatcttgtatcagaagcactccacaaggcaggaagaaccgatctcatcggtttcggtccaaagtgtctgatccggccacggaaatttgccgatcagaagaaaaatgaaagagaaaagaacagcagtcagaagaaaaaatccattcggaatgtacaccgaaagaaatgaggtcagaatgagagtagcgattgtcaccggagcatcttccggtatgggacgtgaattcgtccttcagatcggagctttatataaaaacctggacgaaatctgggtgatcgcaaggagaaaaggaaatttagagagagtggcagagcagtcccgtctgcctttgcgtatctttgacggagatcttctgaaaaagcctgtctataaagctttttgcgaggcactctgtgaagacactcctgatatccgtatgcttgtcaacgcagccggattcggaagatccggttctgtagaagagatcaatatgcagcggagacggatccagacagacatggttggcttaaattgccaagctttaacaagaatgacccttctctgccttccttacatgcatcctggaagccggatcgtcaatctggcatcggcagcagccttttgtccacaaccgtattttgcggtttatgcggcaacgaaatcctatgtgctgagcttttcccgttcgctcagagaagagcttaagacccgcggtatcatcgtcacagcggtctgtcccggtccggttgacactcccttttttgatgtcagtggaaagcctcagaacttcttgaaagaactgactatggcacagccaggaccggtggtacatcaggcactgaaagacagccggaaaaggaaggagctgtctatttacggacttccgatgaaactgacctatgccggcacgaagctgctgccacataaattgctcctgcgtatacagaacctgtagataatcgatcttttaaatgaaaaggaaatcaatcatatgaagaaagttgaaaaggggaaacccggttatttaaattataaaaagaaagcagagattctccgtacagtcatttattttgccattgtcgcagccatctttctgcttggatacacccagacgcatacccgtctcaacatgatgactgttgtggcagttctcggctgccttccggcatccaaagcactggttggtgtcatcacccgctttccgtatccgtccattgatcctgacagggcaaaggagattgcaaaaatttcccgccatctgacggtctgctacgatacagtcatcaccagccgggaaaagatcatgccggcagactgctttgttatttccgggcataatctttatggttatactcattatgagaaagtgaatcctgaggaacttgcaaagcacatccgctcgattctttcccagaacggttacaccggactgacagtcaagattttaaaccagtatgcaccttttcttgcaagagtagaagggcttgataatattgcagcagtagaacaggaagatacaaagcagaccgaacaggaaatccgacaccttctgctgaacatttccatgtaaaatggttctgaatttcggagaaaagacaatgaaagaaattataattaaaaaaaatgaagccggacagcggttcgacaaatttcttgcgaaatatatgaaccaggctcctaaaagctttttttataaaatgctccgcaagaaaaatatcaccctgaacgggaaaaaggcagcaggaaatgaaattctcgaattaaatgataccgtccgtctgttcctttccgatgagaccattcagaaattttcaggcaccatacagcagtcccccggagatcccgactggatcctggctcatgccggaaaagagctttccattatttatgaggatgaatccaccattttcctgaacaagcccgcagggatgttgtcccagaaggcaaaaccggacgacatctccatggtggaacacctgatcgcttatctgctgaacagcggtcagatttccaaagacgaactgcggacatttcatccttctgtctgcaaccgtcttgaccgcaataccagcggactgatcgctgccggcaagaccctgcaggcactccagcagttaagtgaaatgttccgtgaccgcagcctgaaaaaatattatctctgtcttgtccgtggaaaagtttcttccgacagtcatatcagcggctatctgaaaaaagatccccggacgaaccgggtcactgtcagccggactccgtccgcagcagcttccccgattgagacagaatatcatataataaagcaaactgaagatgtcacacttctagaagttcatctgatcaccggaaagacgcatcagatccgtgcccatcttgcatccatcggtcatcccattgcaggagattataaatatggaaaccgggctttcaatgagactctgaaaaaagaatatggtctttcctcacagcttctccacgcataccgtcttaattttccgaagtgtggcggagatctttccctcctttcgggaaaagaacttcaggcaccgttgcctcctctttttcagaaaatctgtcagaaaaagggtgtgatataaatggcaacctggaattcgagaggacttcgtggttcgactctggaagaatttatcaatcataccaatacccgctacagtgaaatggggcttgcactgatccagaagattccaacccccatcactccggtaaggattgataaagagcatcggcatattacccttgcctattttgataagatcagtaccgtagattatatcggtgccgtgcagggcattccggtctgctttgatgcaaaagaatgtaatgctgatacatttccacttcagaatgtccatgaacatcagatccgttttatggaaaaatttgagcagcagggaggaatcgcatttctcctgatctattatacagcccgtgaggagctctactatatgcaataccggcagatccgccgattctgggacagggcagaggcaggtggaagaaaaagcttccggctggatgaactggaaccggactggtttatgaaacttcagaatggcttttttattccttatcttgattccatccagaaggatttggacacgagggattgacagaagcagagaaaatccgtataattacaaacaggttttaacgtattagcagactaaagtgtttaagaaaggtgaatctacatggaacagaaactgcatacaccggaaggcgtccgggatatatataataaagaatgtgaaattaaactgacattgcagaaaaaacttggcaccgtacttcattcctatggttatcaggatattcagactccgacatttgaatattttgacgtattccgtaaagaaatcggttctacttctgcaagagaaatgtataaattttttgatcgggagggaaatatccttgcattacgcccggatatcacgccttccattgccagagccgttgcaacgctttttgagacggaagattttccaatccgcctgtgctatgccggcaatacttttatcaaccattccagttatcagggacggctgaaagagaacacccagcttggtgctgagctgatcggtgtcgattccatcgaggcagacgcagaaatgctcgctatggtggtggacggactgaagaaaaccggactgaaagaatttcaggtcagtatcggacatgtagactttatccagagtctgttccaggcagcaggtcttgaggaggatgaagcagaagagctacgtaccctcatcgccaaccgtaacttctttggagtagaggaagtactggatcatatagatgttgctgactctgtcaaagaagcatttcatcttctgcctgaactgaccggcggagcagagatcctggatcaggcactttctgttgccccgggagaaaaagccggtcaggcgattcatcgcttaaagcagattgatgagcttctccgcctttacggagtggaagatcatatcacatttgatctgagcatgagcggaaattacggatactataccggtatcattttccgtgcttatacttacggaacaggagatgctgtcgtacgcggaggccgttacgatcatctgcttgaaaaattcggtaagaatactccatctatcggttttgccatcattttagatgaactgatgaatgccctgaaccggcagaacatccaagtagagaccggcagccgcaatctcctcgtctatacacaggatactgaaaagtgggccatctcccttgcaagaacgttccgcagtaaagggaaaaatattgaaatgctcaagcgtaatactgaggatgaccgtcaggtatacgaggaatacggaaagcgatcttccgtcatgaccatgctgtatctccgggatgacctgaagattgagatgatcaatttccgcacaggcgaaaagaagatcatggacacgaaaaagcagaagtaaaggagcagaacctatgagatatttaacatttgcactgaccaaagggcgtcttgccagtaagactcttgatatgctggaaaagctcggaattacctgcgacgagatgaaagataaaaactcacgcaaactgatcttcaccaatgaggaactgggactccggttcttccttgcaaaaggtccggatgtaccgacctatgtagaatacggtgccgcagatatcggtgtagtcggaaaggataccatcattgaagaagggcgaaaagtccatgaagtacttgacctgggattcgggaaatgccggatgtgtgtctgcggtcgtgaagagacagcagagaaactgcagcatcatgaactgatccgtgttgccacaaaatacccgaatattgcgaaagactatttttataataagaaacatcagacggttgagatcgtaaagttaaatggatctatcgagcttgctccgatcgtagggctttccgaagtcattgtagatatcgttgaaaccggttctacactgaaagaaaacggactggtcgtattagaagaggtatgccctctgtccgcccgtatgatcgtcaatccggtcagtatgcgtatggagaatgaccgcattaaggaactcatcacaaatctcagaaacctgctcagggaggaataaaaatgcgtattgaaaaattaacagaaagtacaaagaaaaatctgctggaagaccttctgaaaagaagtcccaacagctacggaaaatacgaagccagtgtccagcagatcctcaacgatgtaaaggaaaaaggagacgaagcgctctttggttatacagaaaaatttgacggagtaaaactggatgcttcccagatccttgtcacagatgctgagattgaagaagcctatacagaagtaggagaagagctgctcggtattatccggaaagctctcgtcaatatccgtacttatcatgaaaagcagatgcaatacagttggttcgacagcaagccggatggaaccatcctcggtcagaaggtcactgcactccagagagtcggtgtctatgttccgggcggaaaagcggcttatccgtcttccgtactgatgaatatcatgcctgcaaaagtagccggagttgatgaaatcatcatggtaactcctccgggaaaagatgggaaagtaactcctaccacattagttgcggcaaaggaagccggagcagataaagtctataaagtcggtggagcacaggccatcggagctttggcatacggaacagaaagtattccgaaagttgataagatcgtcggaccgggaaatatctacgttgcactggcgaaaaaatctgtttatggtcatgtaagtattgattccatcgccggaccaagtgagatccttgtcctggcagatgagacagccaacccacggtttgtggcagcagaccttctctcccaggcagagcatgatgaactggcttccgctattctggtaacaacaagcatggagcttgcagagaaggtttccacacaggcagatgcatttatcaaagagctttccagaggagagatcattcagaaatctctggataattacggacatatccttgttgcagacactttggaagatgccattgatgcggcaaattcgattgcatccgagcatcttgagatcgtgacagccaacccgtttgaagtgatgacaaagatccgcaacgcaggagcaatctttatcggagaatactccagcgagccgctgggagactattttgcaggtccgaaccatgttctgcctaccaacggaactgccaagttcttctccccgttatctgtagatgattttatcaagaaatccagcatcatttcctattcaaaggatgcactggaaaagatccatacagatatcgaaaaatttgccgaagcagaacatttaactgcacatgcaaattccattaaagtaagatttgaataagaggagttggcaggatatgaaaaagaaccgcattgcaagctgtaaaagaaagacaaaagaaaccgatatcgaactgaccatcaacctggatggtcatgggaaaaatcagattgacaccggaatcccttttttcgatcatatgctggacggctttgcccgtcacggactttttgacctgaccgtcagcgtcaaaggcgatacagaagtagattcccaccatacgatcgaagataccgggatcgtgcttggtcatgccattgcagaagctctaggcgataaagccggtattaaacgttacggctattttatactcccaatggatgagacacttgcactcggagctgtcgatctttctggcagaccctacctgaacttccaggctgaatttaccgtacctttcctcggaacaatggataccgaaatggttcgtgaatttttctatgccgtatcgtacagtgccgctatgaatcttcacctgaagatcctggatgccggaaataaccatcacatggcagaagctcttttcaaggcatttggaaaggctttggatctggcagtatccgaagaaccacggatcagtgaagtatggtccacgaaaggcagtttgtaggctgattttttgaaagccatcccttaaaaggaaataaaggagtaacccggacatgagttataagagattaaccccatgtatttttatagataaaggaaaggcagttacatggtttgacgattattctgttctgtcagacgatgtcattgcccttgcaaaacactacaatgaaaaaggagcagacgaactgatcgtatttgatctgtctgactcggatgaagaacatgatgaatccatcgaactgatcaagcagatcaaccgtgtgatcagtattccgatgatcgcaggcggtaatatccgtcgtgctgaagatgtaaaaaagatcctctatgcaggtgctaaacgtgccatgctgaatttctcaaaaccactttcgattgaactgatcaaagaagtttcccagcgattcggcaaggaacggattgcagtttcactgaatgattttgacgcactgttcaagcagcagcatctgatcgaggagtacagtacagaaatgatctttatgcaccgtctggatcttaattctgttgtaaatgtcactgagatccagtgtgtagtcgtaaccgataccatggaagagagtgagatcctcaatattcttaaaagcgacggtgtcaaaggcgtttcaggacgctttatcagccggctggatatggattttaatgtattcaaagatatctgcgtgaaaaatggaatccgcatgacaacctttgaaagtctgatggatttcggcgaatttaaattgaactcagatggactgatcccggtggtaacgcaggactacaagacaaatgaagtcctcatggtagcctatatggatgaagaagcctttgaacataccgtcaaaaccggccgcatgacttatttcagtcgcagtagacagagtcagtggatcaagggagaaacttcaggacacttccagtatgtaaaatctcttgccatcgactgcgataaggatacccttctcgcaaaagtagaacagatcggagctgcctgccataccggcaacagatcctgcttttatacaaccatcgtcggagctgactatgatgcgaaaaatccgcttcagatttttgaatccgtatacaatacgatcttagaccgtaaagagcatccaaaggaaggttcttataccaattacctgttcgataagggattagacaagatcctcaaaaaagtgggagaggaggcaacagaagttgtcattgccgccaagaatcccaacccggaagaagtgaaatatgagctttccgattttctgtatcatgcaatggtacttatggcagaaaaaggaattacctgggatgacatcaccaaggaactggcagaccggtaggaataaattaagtctggaatccagtaagataaattgagactgaaataagataatttgaatcggaaatacatttcagatttgaaaagttctgaaaaaagaaagacagacataggatattgtaacttcagtatcctgtgtctttttattgccgtgcatacacccaaaagattccgtggatctttttagtttacatgcacaacgagccactggattctatcagcaggagagcagactatgaatgattccgaacttcgtcgccgtgaactcttaaagcagacccgcagactctatcaggattctgctgccatacccgccgttcatccgcgctacggccatatctatcacgaactttatgatacccctgattccggggaaggcgaacaccattcaggttctttctttgccaggctgatgctggcagtctttctctttttaagctttgtctacatagaacagaaccatctgaaaccggcagatatcagcagcacacagatcgtcaacgagattcagaaagaaatctccggaaatgaaatggattttatcaatacgattaagccccactaaaattatggatacattagtattcatattgatattttaagttgaatataatgggaatatttcatagcaaggaatgtatatctgactggattatatatttcttgctatttatatttacggaacatttgtatccattatttgaatttttgtaaggatattttcgtatccaattttctgtttattataaattttgtatatttttcttttcttttttatgtatttatcaacatatttttatataaatcatatttttttaaaatatgatatgtattttgtatattttaattgcgttatttcactttgtattgtatatttttatcaaagaacggattttcttcacggtaaaggagagacttttatgaaaaaattaaaatatttttccatcctacttttatgttctctgtattgtctgctgttaagtggatgttcctttcaaaaaaaagaagagatcatctggtatatttccaatccccatttctttcacattgatgacgcagttccttatgaagatctgagttctgaacggtttgatctgttcaacaaccggctggaagaattgaacattcctgcaaaggttacttttcggtatctgcctgatatggatatgtcctctgatgaatctgacagtatcattgatacttataaaaagagtcttgacttttctgctcatcttatccggactctgaaagagcaggatcctcaggctgacatagtaccattttctcctatggaatacagggagtttgttgctttggacgattctcttgcatctgaaaaaaattcttccgttttacattcactgcctgatcctatatggaatgtcaacaggatcaacggaaaaacttatcagattccccgtggatctatgccgctttctgatactatttacagtttttccgcctcatttcttaaagactataacctgactcttaacgaacaggaaatcacctctatgactcctgaagaggtgattgattttctgttcccttattttgaggataaccgattgctggacaaaaaatactatttaacttctgccgatgatctttctttaggcaactgtaactattataagtatctgccgcttttgcgtggcttttcggattccagtctcgctgtcgaccgggaaaatggtaaaattgtaaatctgctgactacagaagaaatgctgaacaatctttcattagcacaaaggatctaccgtgaagatctggatatccacacagaacttcagacagcagtgccggtatttacgattgaaaccattccaactttagaagaactgactgtatcaactgcttattccgacaggattcgtttttctctcggaaagagatatctgtgtccttcaattgggaatggtgttctcaataccagctccaaccaacagcttgccattgaagttcttgctgcatccatgtacgatgagacgctgtccaatcttatgatctatggagttccggataaagattatacgctagagaatggacacgccatctataaatttaatcaggtaatttcaagtgtgggcagtttcagtccggtagggaataatctgatagcttatccgaacgaatatgaagtaactgataaagttctggtttcagagaaacttttagaggatgagtctctccttcttccttgcagcaattttgttcctgatgttgatgatacaacatgggaacaaatatcaggaattgcagccatctgccatgaagcagttttcacggctgaaagtgaggagatttctgatctgaacacatttttgaaagagcagaaccagaaattgtatgatgcaggtattgaatctctcctttccgggattcagtctcagcttgatgctcaaaaggaggactaaaccatgcttttagaaatgaagaatctctgtaaatcttatggtgaaactattgccctggacagacttaaccttcagctgacccccggcatttatggacttcttggtccaaatggtgccggaaaaagtacccttatgaaattaatctgtatgctgatccagccaactgatggttttgtcttatttgacggagaggacatccgtatgcatcggagcaattttttggaccgtcttggatacatgccccagcattcctgtctttacccggactttacagtacaggaatatctctattatgtcggtgcattaaaaggcatgcataaaaaagatgtgacgttcagaacggaagagcttcttctccggacacggcttatggatatgaaaaaggataaaatccagaccctctccggtggtatgcagcaacggctgatgtttgcccaggctcttttaaatgatcctgaaattctgattttagatgaacctaccgccggacttgatccacagaagcgacttgaactgaggaatttgattgctgaatattcaaaagataagatcatcctgctcgcaacgcatatcgtaagcgacattgaactgatcgcatcgcagatcttgttattaaagaaaggaaaactgatcaaagccgatcctcccggtgcgttgaccggccagcttacatcaaaggtctgtgagataaatttttcccgtccattgaaagaactcgaaccgtacggcagaatcagcagtatttaccgacgtaaagaagatatttttgtcagactcatattaaatgatcctgccatacttcctccacaggcttctttcgtttatccgacactggaagatgtctacctgtactattttaatgacgaagaggaggtgtcccatgaacatttttctctatgaatggaaaaaagtctggaaaaacggagcagtactgaaagtggttcttctttttctgatgttatctgctgccatcttctgggcagatacagccatggattctgaaatccgtaccgcctacctcgactgccataaaactctggattcccttcctgcagatgaggctgctgacctgttaaatgcttttaccttaaccgatgagacagattatataaaaggtcatgctcttgaactcatccattctgagatggattccgtaaccggttatgaagattaccgacaatctattcagaaccggtatacccaaagccagaaaatttctgtctttcagggaactgcttccggtcagaatcaatatatgcagcgaattgcagaacgatataaaaaactcaccctgcattttccgttaacgcttcagccatatcagggtatccgaaagctgatggaattttaccctgcggatttatttacagtaatcctgctcatttatctgaccagcatcgtatttatacaggagcagagaagcggacagtacgccttttctcttaccacaaaaaacgggcagcggcgactgtacccggcaaaatttttaactgtctatttcagcattattgtctatctgttactgacttttttattttattttgttctgtccggttttctgtatggctttccttcaatgactgctgccatacaaagtattcccggataccatgctgttccatatgactggaatattttgacttatttttgcgtcttcctgcttttgaagagctttgcattctttatacttaccagccttgctgtctttttggcacgccgccttaattctgaaatggcagtttcttttttgcttgccggatttgtaggattcagttttctgttgtcagacaggtttcaggggaatgacagtaattcgatccttcgactgtggaatatatggacgcttttgcaggggaaatctttcattcgcagttatgacctgatccgctttcatggtctgcttatagaagtatactggggcatacccctgttattcgttctttctctgctctgcctgctattcgggaaaaaacagtaccaatctgcaaaaagagcgaaagttttttctttccatcgcagcaacagggtacatggtttgtttttctacgaattaaagaaaacttttatctgtcagaaaggattggttctttttcttgcctgtatcatgatccagatattcattctgtcacaatacaacgactatttcgggacggatgaatattattatcagaattatattgatcagtttggcgaccggattgatgatcagactgatgaaaaacttcagaatgaagaacagcggatcgcagctttatatacagaactcgaaaccactgaaaactctgttactgcttataaattacagcaggaactggaatgcgaaggcggctttcaacgatatgccgaccgagtccgggaactgcgggaagacggaagatccccccttctcctgaaggatgcacaatatacacttttatttaccaatacacccttgtcgcgttcctgggtcatcctgctttgtatgtcttttgcctttcttgtgatttcggttttttacagagaaaaggcaacccatatggaattattacaaaaatccagccttttcggcaggagaaaacttttttattttaagtttttgacattactgctttattttattcctttttgtctgctgggtgcagttctgcggctgatatggagcagcagccattatcggcttgactgggacgctcccgccaactgcctggaaattttcagagaaaccgggattacctgctccatccgttccatttttttccttggaacccttttgcagtgcatcttcgtagtcctggcattgctcctcttatccagacttgcagaactgtcaaaaagacgctacctgatgccggctattattctgggatgtacagtaattccaacactgctttccccctattttccagtcgcatggcttcagatagtccacaacttattttttatatttacagcatccgtttactttatttcaggcacattattgatccttgcggtctgtgccgctttcatcacagaaaggaagatgaggaatgaataaaaagaaatgtttaatgcatctgatactggtattttttatctgtctgcttctgccgggatgtaacagtcagtcttcagaccgaaaagaccctgataacccatttaattcccacgatcgctatatttccatgctcagttattgcgaatcggatcagggaatctattatatagaatgggaatccgaactgtgcagactttatttcattgataaaaaaagctctaaaaaacccgtattatgtcaaaagataaattgcaggcatgactctgcggagtgtcccgcggtagaagtctcccctgatctgatgggatccgtagcctattgtgacggtttcatttattatatcgttcagagctttgattccggcgaacagaacgatgtcctgaaattatactccatgaaggaagatggtacagagaaaaaggaactgcacacttttcaatacggaagagtctatcccaacgctgctgcattttataaagacaggatcattttatccgtccagacattaaatgattttgaagatggaagtggcagctatacagccgagccatcgattatcctgtatgatctgaaaaccgggaaagaaacactgatactgaatggaacggaaaacagcggtctgtataccgttcctgccggtgctgatgaggatcatttatatcttcttcaacaaccctttaacgattctgacattgatggacgctgtacctatcttcaatatgacctgaaagagcagaccatggagcctttgtatgaatccagggtaaaagattcacagatcattgcagacaatactttatatatccagccggacaacgaacaccggctcgtaaaatataatctcaaaacccaaaagcaggaagatgttcttgactgggatgcctctgtcgacaaagtctgggtaattgatcgggatcttattcttcttattaaggagacacgttccgaagattcctctaaaatacagtatgtcaactggtatgacctgaaagagcagcagtacctttttgatgaatactctgactacaccacccttgaggttatgggaaagacagaaaaaggattcctggtctggaaagaagatgaactgtatttttataccccggacgatcatcattgggaaaaaattgaggagatttcataatgtcaaaattcctaaaagaggttgctttttctctctgttaaagctatgattatgtaagtattttttcaaaaccaaggagtaaccatgagaaaattagcattagatgatgatattttactgagtattgaaaagcctgcccgctacatcggcggagaggtaaatgcggtaatgaaagagaaggagctggaagccggtgagattgcggtacgctttgccatgtgctttcccgatgtctatgagatcggaatgtcgcacctcggtattcagatcctatatgatatgttcaaccgcagagaggatgtatggtgtgagcgtgtctattcaccatggatggacctcgacaagatcatgagggagcaggatctccctctttttacgctggaatctcaggatccggtcagatctttcgattttctggggatcacgatccagtttgagatgtgctacacgaatatccttcagatcctggaattaagccatattccgcttcattcttccgatcgtacactggaagatccttttgtcattggcggtggtccatgtacctacaatcccgaaccactggctaaattttttgatctgttctatatcggagagggagaaacggtttacgacgaattgctggatgcctacaaggagtggaagggcagtggcaggtccagaacagaatttctggaacgtgccgcacagatcgagggaatttatgtaccttcgttttatgaggctgaatatcatgaggacggcactttaaagtcttttactccgataaatgaccacgcacttgcagtcgtcaggaagcagatcgtcatggatgtgacggatgcaccttatccgcaaaagccggtcgtaccgtttatcaaggccacgcaggaccgggtggttcttgagatccagcgtggctgtatccgtggatgccgtttctgccaggcaggaatgctttaccgtccgacccgtgagaggaatgtcgaccgtctgaaagaatatgcacatgccatgctgaaaaataccggacatgaggaaatttctttaagttccttaagttccagcgactattccgaactgaaagaactggttcttttcctgatcgatgaatttaaggagcaggggattaatatttcgctgccatccctgcgaatcgatgcattttcgctggacgttatgagccgcgtacaggacatccggaaaagcagtcttacttttgccccggaagccggttctcagagaatgcgtgatgtgatcaataaaggtctgacagaagaagtcatcctgaacggtgccggacaggcctttgaaggcggctggaccaaagtaaaactttattttatgctgggacttccgactgagacggaagatgatatgaaagagatcgcccatctttccgaaaaagtagcccgcagatattatgaaattccaaaggatcagcggcacggaaaatgtcagatcactgcaagttcttctttcttcgttccaaagccgttcactccgttccagtgggctccgatgtgcaaagcagaagaatatatgaggcgggcccatctcgtcaacgatgagtttaaggcacaacttaaccggaaaagcctgaaatacaactggcatgatgcacaggtcaccgtccttgagggcgtgatggcacgtggtgaccgccggatcggaaagctgatcgaagaggcttaccgtctcggatgtctgtttgattcctggacagaaagttttcataatgaactgtggatgcaggcctttgaaaataccggcattgatctggaattttacaacctccgtgaacgcagtgaagacgaattgttcccatgggatttcattgatatcggggtcagccggaaattcctgagaagagaatgggaacgtgccatgaaagaaactgtgaccccgaactgccggatgcagtgttccggttgtggggcagcaaaatttggaggaggtgtctgttatgaaagcaagaattaaattcagaaaatacggagcactccgctttatcggacatcttgatgtcatgcgtttttttcaaaaggttatgcgtcgggctgatattccgatcgcatttacaacaggatacagtccccatatgatcatgtcctttgccaatccgcttggcatcggactgaccagcgacggagaatattttgacatagaactccgggaggctgtcaacagccgggacgctgtcagaagaatgaacgaagcctgcgtggagggcattgaggttctcagcatccgacggatttccgatgagaagaaaatgaccggaatgacgatccttgccggtgcagattatctgtccacgttccgtaaaggagaacttccctctgactggaaggattcttttatccggtttatggaacagccggaaatccgtattctcaagcagacgaaacgcagtgaaaaagaagtggatatcaagcctcttatctatgactgggagatccggagagattctatctatacaaaagtggcagcaggcagtgtggaaaatctgaaaccggatctgatcctggatgctttctgcagcttcctcggtcttgctttcgattctctgaaatttcagcatcacagactggagatgtatacagaccgcagcgaagatggctctctgattccactcgaagcaatggggacagagatggcaggtgacgaagaatgaaaagaaaaatactgattgaaaaaaaagagaagaaagtctggacgtttcttttagaaaatgacagcattaccgagatccactgcactcccgaaaatgatgaaaaagcccattatcagattggcgatatctacattggaaaggttcagaatattgttgcaaatatcggagctgcttttatagagattgccccgggtgtcaactgttattttgacctgcagggagtgcctacagctctttttacgcataagatcggcaaaaagcctctctgtatcggagatgaacttcttgtccagatcagcagggaggcagttaagacaaaagctcccaccgtcaccggaaatctgaacctgactggacgctatgcagtcctcacgcacggaaatacccggatcggagtttcttccaagattcctaaaaaagagcgggatgcctataagcagcggcttcaggcatatcagaatgaccgtttcgggatcattgtccgcaccaatgcaaaggaagctccgtttgaggcggtcgtaaaggagattgaagatctgaaaaaagagtatgagaggctgacctccaatgccatgtcaagggtctgcttttcctgcctgaaatcggcaccttcgtcctatattacggatctgaaaaatgcttatatggatggaatgcaggagatcattgtaaatgatccggagctttaccatacaatctgtagtttttttgaccgggaaataccggaatgttctcatctcatccggctgtatgatgatcccggctatccactgggaaagctctacagcactcagactgccatcgaaaacgcactgaaagaacgggtctggcttaaacacggcggatacctgatcatccaggtcacagaagctttaacggttgtggacgttaattccgggaaaagtattaaaaaatccaaaaatacaccggatgccctaaagctgaacctcgaagccgcccaggaaaccgcccggcagatccggctgcgaaatctttctggcatcattctggttgactttgtaaatatggatgatcctgaaatggaagaaactttgttccaggaatttcgtttttatcttgcgaaagatccgattcagacaacactcgttgatattacagcactgggactggcagaagtcacaagaaaaaaagtacgcaaaccactctatgaaatgataaccgtataaaaatcaggaggcggtcatattgagtaaaaaagaattaaaaacaaatgcaatgaggtttcttgaccggaataagattccttatgagtatcagacttatgaatgtgatgaatttattgacggcatttccgttgctgataaaatcggacttcctcacgaacaggtttataaaactctcgtcacagtcggaaaaagcggtggacattatgtctttgtcattccgattgcggcagaactggatctgaaaaaagctgcgaaggccgtaggtgaaaaatcggttgagatgctccacgtaaaagagatcaccaaagtaaccggttacgtccggggcggatgtactgccatcggaatgaagaagcagttcccgactgtgattgatgaaagtgcatgtactcagaagctgatttacgtcagtggcgggaagatcggaatgcagatccggctgaaaccggatgatctgaaaaaggctgccaatgcagagtatgcagccatcactttctgacgggaatttctgatgggatttccgttttttatttacaacctaccaggaacgaggtataatattgaaccgataggttctgatgcagggcagtgcatataattcattaatccatttgattccggacatcagaataatacagaatatcgtaggattgtgggagtgcgtagcacggagcaatccgtaggcatcaaagtcgggggcttttgaccccgacatctatcgtatgcagaatgcacaatttacattttggaggaagttaagaatgaagaaagtagtaaagttcggcggaagttctcttgcaagtgctgaacaatttaaaaaagtcggaaatattatccatgcggattcatccagaagatacgttgtaccgtcagctccgggcaagcgtttctctgccgacataaaagtaactgatatgttatatgactgctacggagcagcagaaagagaggaagatttcactgaaaagctcgcagcgatcaaggcaagatatcaggagattattgatggtctcggtctgaagttctctcttgatgcagattttgaagtgatccaaaagaattttgcggcaaaaagcggttccgactatgctgcttcccgtggtgagttcctgaacggtaaggtaatggctgcctaccttggttacgagtttgtagatgcagcagaagttgtacgatttgaaaaagacggtactttcaacgctgaggtaacaaatgagatcctgtctgcccgccttgcagagctggagcatgcagtcatcccgggattttacggtgcaacagaagatggaacagtcgttacattttcaagaggcggctctgatgtcaccggttctctcgtagcccaggcagtccaggcagatctgtatgagaactggacagatgtttccggtttcctgattgccgatccgagaatcgtaaaaaattcaaaatctatcgaaaccatcacatataaagaacttcgtgagctttcctacatgggagccagcgtactccacgaggatgcgatcttccctgtaagaaaagccggtattccgatcaacatcaagaatacaaatgcaccacaggacaagggaactctgatcgtagaagcaacctgttgtcagccgaagtatacgatcaccggtattgccggaacagacggtttcgctgctattacgattgaaaaagcaatgatgaactctgagatcggtttctgcaggaaagtccttcaggtatttgaagacaacggagtttccattgaacatatgccatcaggaatcgataccatgacaatttttgttcacaaggatgcctttgaagaaaaagagcagaagatccttgcgggaatccataaagccgtaaatccggatcatattgagcttgagtctgatcttgcacttatcgcgatcgttggtcgtggaatgaagtccacgagaggtacagcaggaaggatcttctctgcactggcacatgcccatatcaacgtcaagatgattgatcagggatccagcgagctgaacattattgttggtgtacgccatgatgagttcaaacatgcgatccgtgcattatatgacatttttgttctgacccagatctaaacacaaatgtcagggctgatctttttaagaatcagccacagaacagacagcatataaaaggacagaatcaaaatgaatattttattttttctcaagccaaaaagtgaggttgcatttatctatgaccacagtacgctccgacaggtactggagacaatggaatttcataaatatgcttccattcccatgctcaataaagcaggagagtacgtcggtactatgaccgagggagatctcctctggggaatcaagaaatatactcacctgaatgtaaaagaagcagaaacgatttttattcagaacttcccgcgaaaggctgattacgaggccgtgtcagccgatgcggacatggaagatctgattcagaaagccatgaatcagaattttgtaccggttgttgatgatcagaaaaagttcatcggaatcataacaagaaaaagcattattgaatattgttatgaaaaattaaaaaaagccaaagaacctattgactaaaccggtgtctgtatgctaatatacaatggtatgccgcacaacgaggttttcaagttctgtatgacagacaccatagttggcgagtaatgataataggaggtgccatatgtacgcaattatagcaacaggtggtaaacagtacaaagtagctgaaggcgatatcattaaagtggagaaacttggtgtagaagctggagaaacttatacatttgaccaggtgcttgcagtgaacaacgacaagatggttgttggtaatccgactgtagagggagcaacagttacagcttccgtaatcggtgacggcaaagcaaaaaaggttatcgtttacaagtataagagaaaatctggataccataaaaagaatggtcacagacagcagtatacagcagttaagatcgaaaagatcaacgcttaatctgttatccgatgattaagataaccatttataagaccgaacggcacgaatatgtgggatttgatacagaagaccatgccggatacggtgagcagggacaggatattttgtgtgctgcctgctccgcccttgtcatcaatgcactgaactccattgagagattcacggatgatgagacaagctgtgtatctgacgaggataccggaagtatttccttccgttttaacggaaagccttcccatgatgccgcattattgctggattccatgattcttggtctggaagagatagaagacagcaatgaatacgaacaatatatcgacataattttcaaggaggtgtaattaccatgatgaaaatgaatcttcagttttttgctcataaaaaaggagttggttctacaaagaacggtcgtgactccgaatcaaagagactgggagcgaagagagctgacggtcagtttgtaaaggctggtaacattctttacagacagcgtggaacaaagattcacccgggtcttaatgtaggacgtggtggagacgatactctgtttgcacttgtagacggtgttgtaagatttgaaagaaaaggaagagataagaaacaggtttctatctatccagtagctgagtaatcggcgttgactggaaagttccgacggaatcttttcactcgcacaaatggcaacaacagaagcctcagacttatttcagtctggggctttttatcaacttatcattattttataaattaaaggagacaaaatatgtttgcagacagagctaagatattcatccgctccggtaagggcggagatgggcattgcagcttccgaagagagctttatgttcccaacggtggtcctgacggcggagacggcggcaagggcggagatctgatctttgaagtggatgaaggtctcaacacacttgtagattaccgtcacaaaagaaaatatgccgccggagacggagaacagggcggtaaacgcagatgccacggcaaagacgggaaagaccttgtcctgcgtgtacctgaaggtaccgtgatcaaagaagctgtttcaggaaaagtcattgccgacatgtcgggagacaaccgtcgccagatcgttctcaaaggtggtaagggcggactcgggaatcagcattttgcgacctctaccatgcaggttccgaaatatgcccagcccggacagccggcccgcgaactggaagtatatatggagctgaaagtcattgctgatgtaggactgatcggattcccgaacgtagggaaatccaccctcttatcccgcgtaacaaatgcggaaccgaagattgccaattatcattttacaactctcaatcctaatttgggcgttgttgacctggacggtgccaagggatttgtcatggccgatatccccggactgatcgaaggtgcttctgaaggagtcggactgggacatgaatttttacgtcatgtagaacgtactaagctgatgatccacgtcgttgatgctgcaggaacagagggaagagatcctgtcgatgacatttacaaaatcaatgccgaacttgctgcctataatcctgaaattgctcagcgtccgcaagtgattgcggcaaataagaccgatctgatctatgaaccggaggacgatccggtacagcgtctgaaagatgaatttgagccaaagggaatccgtgtatttcctatttcaggtgcaacaggcaagggaatttccgaacttctttactatgtgagcagccagttggaacagatggatacagcacctgtcatttttgagcaggaatacttcccggatgatgaactgatctatgaggatcttccatatacggtagaacaggtcgacggaatgtatgtcgtagaaggtcctaagattgaaaagatgcttggctataccaacctcgattctgaaaaaggatttgctttcttccagaaattcctgaaagattccggcatccttgaggatcttgaaaatgcaggcatccaggaaggcgatacagtccgtatgtacggattacagtttgattactataaataagaatccgcacagaaagcggattctgaatgattttgaagattaggagagaagattatgacaacaaagcagagagcctatttaaaagggcttgccatgacaatggatccgattttccagattggaaaggcaagtatgaaccccggacttacgcaggctgtatctgaggcactggatgcccgcgagctgatcaagcttagtgtcctgaacaactgcatggacgatccgagagaactggctgaaactctggctcagagaaccagatctgaagtagttcaggtaatcggaaagaaaattgtactttacagagaaggtaaggatgataagaaaaaaataatccttccataaggagttgcttatgaaagttggaattatgggagggacgttcgatccgatccatatcggtcacctccttcttggtgaatttgcatacgaagatttcggactggacgaaatctggttcgttccaaatggaaatccaccgcataaagaaaccaaagattctgagcaggctttgagaaaccgtgtggaaatggttcgtcttgcgatcgaacatattccctactttaagcttgatctttcagaagctgatactacaaaacattcttacacatatcagactatgaaggaatttaaccgcctgtacccggatgtagatttttatttcatccttggagctgactccttattttccattgaagagtggcggtttttcagggagatttttacaacctgtacgatccttgcagcaatgcgggatgacaaggacatttctgccatgcgtggacagatcctgtatctgaaacagacttatggagcaaatatcgaactgcttcgtgccccactggtagaggtttcctcaactacaatccgaaaaagggcttctgatggtcttaccgtccgttttatggttcctgacaatgttgcagattatattcgggagcaaaagctctacagggaggaaggcagataaatgacagaacaactcagagagataaaaaaattactttccaggcggctgaaaaaagaccgttatgaacatactatcggtgtcatgtataccgcggcagctcttgccatgaactacagggaagaaatccaggctgccctgacagccggactgctccatgactgcggaaaatactgctctgcggaagaacagatccagctttgcaggaagaagaagatcgctctttctgatgcggaagaacagatgcctgcactggttcatgcaaagcttggagtttatcttgcagaacatgagtacggaatcaccgatcagagtgtccttgatgcgatccgatggcataccaccggacgtcctgacatgacacttttagaaaagatcatttatatcgctgactatatcgaaccaaaccggaaactcattcccggattaccggaagtaagaaagcttgcattccagtcgattgacgatgctatctgcctctgttccaaaaatacggtagagtatcttcgtgaagccggcaagccggttgatccaatgagcattgaaacttataatttctataatgtcagggtcaaaaggtctgaaaccacgtgtgcttgcacactggtggtagaatgaccttgagacccgccccgatatgagcataaaagtggggcgtaagcaccatgatatgcgaatattgggtaggattgtgggagtgcgtagcacggagcaatccgtaggcatcaaagttgggggcttttgaccccaacatctttctattgtaaaaaggagaataatatgaatcaggcaaaagaaatggcacgtattgcatacgaggctctgagtgaaaaaaagggagaagatatcaaggtaatcgatatttccggtatttctgttcttgcagattactttcttatcgctcatggtaacagtgacagccaggtaaatgcacttgtagaaaatgtagaagagcagcttcacaaagccggttatcctctgaaagaaagagaaggacaggcttccggaaaatgggttctgatggatttcggcgatgtgatcatccacgtattcgatagagaaaaccgtctcttctataatctcgaaagaatctggaaggatggaaaagaaattcccgcagaagaattataaacttttctgaaaatggaaatagaagagtagtacttctatacaatagaaaaagaagctggtatctgccagcttctttttctatttaaaaaatctcataactccaataacacgtcccagaatcaccacatcctgcacaatgatcggatccataaaatcattctccggctgaagacggatcacaccttcttctctgtaaaaagtcttcactgtagctccatcctcgatcatcgctacaactttctctccattctccgcagtctttgcctcttcaaccaggacataatctccattcaggattcctgcattcaccatgctttccccttgaacctttaaaagaaagagctgcttatttgatacatactctgcaggaaacggaaaataatcttcgatgttctgctgtgccaggatcggttctcctgccgccacacgtcccacgataggaacttgaaccatctctctgcgaagtagattgaaatcatcatccaagatctcaatcgctcttggctttgtaggatctctccggatatatccgttcttctccagtgtctcaaggtgggagtggacagaagaggtagacttcagatgtactgcctcacagatctcccggacagccggtgggaatcctctctgcagaatctgatcttttatatattgcagaatctcttcctgctttttactgatattaccttttgccatatccaatacgcctccgtatacataaaatcttataccttatagtaccatatcattgttttaaaagcaaacatttgttgcgaaaatacgttcgattttttatccttttcttgttgacaaacatctgttcgggcagtataatacatacataagcaagaggaacatacgttcttaatactctaaagggggatttacttatgagaaaaagagcaaaaaagaaccatcacagacagtttattttcttttcagccagtggactgatcgcagtgattgtctgcattatgctgaatgtatttcctgtatcagctgacagcacgcattcccagacaggatctgtctattatacaagtattgagatccagccgggagatacactttggaacattgctgaagagacaatgacttccgaatacagctccgtaccggaatatgtaaaagttctgaaagagatcaattcccttgattcagatcatctggaagccggtcagaatcttataattgcttataattgataaccaaggtatcaatatacaccctatgtattgatatatatacactccctgaacccggagaagcatcccttatcctgcgtgatattccaatgttccatcttaaatgatagtaagaatacaacggcaggagaacattctccgggttctatttacagaagccaatctatacgacaaataccgatttttccaaaagatgtggtgaattctgaccggatatgctataatttatatgatgacagggtcctaaggtctaagcccacatgagcttgctcataggtgggtgaaagaccttaggacccgccccgatattcacatatcgggggatgataatcccacaatatgcgaatatcgggtaggattgtgggagtgcgtagcacggaacaatccgtaggcatcaaagtcgggggcttttgaccctgacatctttctatcagaatattcagagcacttaaaaatacatgacttcaggaggtttttcttatgaatcaatcatcttcagctaacggaaaaaaaatcagctcccctgattcgtccgaggtttttgacacatccccttcaaagacttatcacgaacaggcttatatcgatcagactttacgtcttcgggaaattctgaagacacttcctgcatttgcaaaagattattttcgtgccgttgagccgacaacctctgcacgcacaagaatttcttatgcctatgacatccgggttttctttcattttcttatggaagtgaacccacattataaaaattatacaatcgaccagtttacagttcaggatcttgaacggcttgatcctgttgatattgaagaatatcaggaatatctgaaagtctataagaatgaagaagatcgtcagatcacaaatactgaaaaaggactttcccgtaaaatgtctgcactccgcagcttctacggatattattttaagcgtcagatcatttcaaaaaaccctaccttactggttgatatgccaaaactgcatgaaaaagcgatcatacgtcttgatacggacgaaatcgccatgcttcttgactatgtagagcatggtggggagaatctcaccggacagcggcttgcttattatgagaagacaaaaaatcgggatcttgcgattcttactcttcttctcggaaccggaatccgtgtatcggagtgtgtcggtctggatgttcaggatgttgattttaaaaataatggaataaaagtaacccggaaaggcgggaatgaaatggtcgtctattttggtgaagaagttgaacacgcacttaaaacttatctgtatacaaccaggaaaaatactgtcccgttaagtggtcatgaaaatgcactttttctctccactcaacgaaaacgtatgggtgtccaggcagtcgagaatatggttaaaaaatatgcccgtgaagtcactccgaacaaaaagatcacaccacataaactgcgaagcacctacggtactgctctctataaggaaaccggtgatatttaccttgtagcagatgttcttggccataaagacgtaaatacaacgaaaaagcattacgctgccattgatgaaaaccgccgccgcagagctgccggtgcagtaaaattaagggaagtataaaaggattcttctagataaaaaaggacagagtgggaactcatcattccttccagtctgtcctttttcttttccgtccctttttctgatcttgaattaaatcgtacgctgctcgttctgaatactttcttttaattgaacatactgctcgatcgcttttgcagttccttcgatacccagttctgaactgttcaggcaaagctcataactggcagaatccgaccattttttatttgtataataattataataacttgcacgctttttatctgccttcacgatcgtatctttggcttttgcatccgtcagatcatacagtcttgcaattcttctgatccttgcatccagatcagcatggataaatacgctgactacatttggataagactccaaagcataatctgcacagcgtcccacaagaatacacggaccttcgtctgcaatcttcttgattgcatcaaactgtgccagaaatactttatggttgattggcatatctgtatacgtacttcctgaatagcccatggaatatgtatccatcaccagagaatacagaaaactgttcgtcggtttctcatcatgggtctcaaaaatttccttgcagattccgctttcctttgccgcacgtgccagcatctctttatcataaagcttgattccaaatgcctcagcaaccttagaaccaatctcccttccggcacttccatattgccttcctatggtaatgatcgtatttgtcttcataatcgtccacgctccttctagccattcatattcatccagccattatttataataagcaaaatatatgataccagggtcaaaaggtctgacaccacgtgtgctcgcacactagtggtagaatgaccttttgacccgccccaatatgagcataaaagcggggcgtaagcaccacgatatgtgaatgttgggtagaattgtgggagcacgtagtgcgtaacaatccgtaggtatcatagtcggggcttttgacctcgacatcaatatatgtaatttgcataaaagggaattgcgaactccctttacatatgactattatatacaaattattctgataatacaatccatattttcacttttcttacttcttttgccgcagtgtacttaaaagcttcataaagtactccgggagcggagcatcaaattccatatactctccggtagcaggatgcgtgatccccaggatctttgcatgcagcgtctgcccctccaaatgaaacggacattttgacggaccatacacatcatcccccaggatcggatgtccgatacttgccatatgcacccggatctgatgcgttcttcctgtctcaagttcacactcaatatatgtataatttcccagacgttccagcactctataatgcgttactgcatgacggccgttaagagcctttgtactcatttttttacggtcggtcggatgtctgcctattgaagcatttacagttcctgtatcagcctttaaagagccatgaacgattgcatggtatcttcgggtgatcgaatgttcttttagctgttccgcaaggatctgatgtgcatagtcattcttacagatcagaagtgatcctgttgtattcatatcgatccgatgtacgatccccggacggatcacaccgttaatcccggacaaatgttctccgcaatgatacaggatcgcattgaccagcgtatgatccgggtgtccgggagacgggtgtacgaccatccccttgggtttattcacgatcaaaatatcttcatcttcatacagaatatccagcggaatattttctgctgcaatatccagcggttccggatccggcacttccacatcaatctgatcccccgcattcagcttataatttgctttcacctttttcccattgacaaggatcagaccgtcctttaaaagtttctgaatataagaacgggaaagatcgcccagattctctccgagaaacttgtcgattctttcccccttttttttagatatgagactcatctgttccatattatttatttccttttctttttgaagctttcagaaaatcaaagtctgattcatccttatagtaaaaaaggatcagacacgcaaaccagatacaggcaattaccacataacagtctgccacattgaacactggaaaatcgatcagactgaaataaaagaaatctactacataattcagccggatccggtcaatcatatttcccactgcaccggatgcaatcaacaccgcacagattcgcagcatacgatagtgtgatgtatatggcattcttgaatacagatatcctatgatccccaggatcacagcagcgatcaccacaaaaaagaactgccggttctgcatgatcccgaaagctgctccccggttttctaaatattgcagttgaaatacatttttaatcaggatcaccggaccattttcccttaaatccattaccgctaaatatttcgtaacctgatccagtgccagggccagggcgaaaccaaccagccccagcagacaacttatttttttattatacgatttcatttcgtattcactccttatttcattgctcagatatatctttcaatctccacactcaggcggttcttcttcgtcttcccacctgtgccgatataccggaatttccccattccacggacagaaatcagatcattttcttttacctgatagccattactggtgatcagtttcccatttacaaatacctttgctccctcaatcaggcctgacaaccggcttcttgaggacgaaaatgccaacgggagcagactgtccagccgcactgaagaaactgtgcctctgaccgcctctgtgcggggaacatattcaactccctcgagttctgtcagacggcatttcaccggtgtatgccgcacattcgacagttcccggctgaccagctctgcaatttctgtctgtgcaaaaagatacgcccgatgttcttccagcagaatatcaccagtcctgctcctttcaatccccagatttaagactgctccaagaaaatccctatgagtaagatcctctgcaaaccggatgttcctcggacagatctccactgcctgaaacgggtatccgagttcctccggcaaaagattcttcttcccgtaacgtaaagaaagagcctcagggatgaatgccgccatctgacgctctgctgatgcatacccgccaaaaaggatataacctgtatacaggttatccttcggcgatgtatgtaatatattctgttcgttcaggttcaggaaatctgtaaatgtaataatgtcccgccgataagccactctggacagatcaatcagtctccgctctaagagatgaacttccttctcactattaccattactataattcttcgccataacggatcctagtatcttccacggacacttgctgtctccatagatcctccaagaagatcctgaagatcaccggaaatatcaacgttcgtcggtgtaacaaggaaaatatagttagaaattttctgaagatttccattaattgcaaaagtagcaccggaaataaaatcaataattctctgagcaacatccagatccatgccttccagattcaggattacggtacgaccgcgaagcagagtctccgtgatctctcgggaatcatccactgatcccggcttcactacacagacctccatattaccgctgctgctatgtctcgcaggtgtacgcatctgcgtaaccttactctttgcaggctgaaattccttttcttcctctacatcaaaatctttatagctgtcttccttgctgctattatttttctttccaaagaaactatgacgtggcttttcttcatactcatcatcgtcgtagaatccaccttcatcatactcatcatattgatcatcataatcgtcctcatttaacttcatgatgtctaagaatttatcaaatacgcccatttttacactccttatctcatgctccctcactgtggaacatccttttattttgtactttcttactcagaaaccggttaaaccgcataatttctggcaccaaagattcctgtacccacacgtaccatcgtcgctccctcttctattgcgacttcataatcattggtcatccccattgaaagtacactcacagtatcattatcatggtttttcttcttaatgtcaatatataatttatgtaaatctgcaaaaatactgcgattttcctctgggtcttctacaaatggagcaatcgtcatcagacctcttacccgtacatgaggaaatgcggacactttttccacaaacggaatcacttcttccattttcattccgaatttactttcctcttccgctacattgacctccaccaaaatgtctgcaatcagatcatgcttcgcagcttccttttcaatcgtctctgcaagcttcagtgaatcaacggaatggatcagctctgctttatcaatgatatatttcactttattagtctgcagatgcccgatcatatgccagtggatatcctttggaagtgcctcgtatttcgctgtcagttcctgtactttattctcgccaaaaatccgtacaccaagatcatatgcctcctgcagcgtctcaacgggcttcgtcttactcactgcgatcagcgttacctcttctctttttcttcctgctctgtcgcaggctgcctgaatccttttttccacttcttgcaactggtcttttaacataatgactcctcctgtaggaaattgattttcttattgaaataccacttcttcagaatgaacacttgtcccgttctgaatgatatggtcataattggataaaccgcctttttcactttcttttacgatatagtattcatcgctttcacagaggatcgtcactcttttaaatacggcatatcctttatttacattgtaaactccttttattcctgtcgtttccgtcaaagtcagacgttcctccgaatccggctggatcagaaccgttccctgtggaaattctttctgtgaaatgtatgccgtccctttgtcctcatccagataataattttccaggatcgtaaactttccatttccattcttatctacagcgatcacccctgctgatgagctgttcgcaccggtcgtaatgcatgtggatgggatctcataataaggcttttccacaactgctgactttggaatcttcagcccactttcatcttcaaagatcagttcaatattcagatacctctcatccgcataccggatcatggaattatcaaaatccaggcatccataataagcaccgtctttttcaatcacagaaagatccgccaccatcttctggctgtccttatcgattctcacctggatactcgtaatttcctcatcctggatcttcttcgcagtttcctcttctaacggaacgatcacagaccagttctcactggtgatcagtcggtagatcgaatctcctttttttactttaacctgatctgtcagctccttttgagaatactcggtccggtcaaaatcttccgcagtaaatgtatcttttgtcagttcttccattccatccgtactgaaagtcataattccatctgctgaagaaggataggacgatacgctctgcccgcttgcagcgatcactgtatcaagctgctgcatcttcgtttcactgacattgctctgcagatatgtattaatctcatccttcagagaataaacggtagaaaagtccatctcggtaaaactgtcattaaaattttcgatcctgtgcgtgatcgaggtctgcacttccgagttcaccgatattgaagctttcgcactgtcggaagatccggtctccagcctggacggtaccaacgcatatacatttgcccctgcctttatttttgaattatcattaaaataataataaatatatcctgagccttctgattttatatcctgctcatcccggatgatcagtccggtataagatgtatctttcacaatacttccttccctcacttcatatacagaaggtgtatcttcggacaaatacagaacaagcgttacgatcagataaaataatacaataacaaaaagaaagattcctatattaagttctctttttcctttatattttctgatattaacagattcgcttttttttgcagccaaaatagctcctttctctccgtactattttcataactaaaacagtataccattattttatgtataattccagtatttgcggtaataataaaagtattgataggtaaaggaggaaaatacatgaagtggtttgataatacttcactgacgctggtaatcatcggtgcagtgaactggctcctgatcggcatcttccggtttgatcttgttgctttcctgttcggtaatatgagctggctctccagaatcatatatacgatcgtcggtctgtgcggattatatctgatcagcttatttggacgtatcggttctatgtcagaataacgcaggatttcaaaagattgcgtaaattttcatacaatctaaaaaagacactttctgaatgatatcattcagaaagtgctttttctgcttctaagagcctgttcatttcctgataaaggaatgccttatcttctgctcccataatcacagaaatataaggatgtgcctccatatcttcactatacagaataacacagcatcccgcctggtccgtcgttcccgtcttaccaccaaaaactttgattccctccggtgcctcagtctttccaagagaataataatttgtcggaaggacttccagactatgtgtatttcccgctgcatccccaatactcattgtataggatgacatcgaaataatctccttaaatgtatcattctgaatacatgcattaaaaatcagatacagatcatatgccgttgtataatgatcatcctcatgcaatccatgtggattcacaaaatgcgttccggtcgctcccagtttctttgcctcttcattcatcaattctgcaaaagcttcaacacttcccgagatatactctgcgatcgcaacaccacagtcattccccgatttcaggagcagaccgcacagcagatcataaagcttcacctgtccgcccggatacagtccgcagaccacctcatctgctgcaaatcccgtcacactgtctgttaccgtcaccatatcttccagctttccatacttcagggcaagatatgctgtcataagttttgttgtgcttgcaggataaagcttatcgtataatctgtatccatattcaacagaccgctcattcagattaaaaagtcctgccgcatgcagggaaggttcatctgtaaacccatccagtgcaacattttccgcacttacacacagagtttctgaaaatggttctgcccgatataagtctgcattatacttttcatctgcatactctgtcagaggattgccgctatgttccgcataatagcatattccacctgccgcagcacctcctgccacaacaagcgtcagaaccaatgcgatcagtctgccggccggattccttctttttcttcgtcttctacgtcttctgctcataattatttatacatctcccgccagtctaaatctccacggtcaagtgcaaggatcagagcctctgctgtcgcaatgttcgttgcgatcggaatattataaatatcgcataactttacaatatcattgacatccggttcatgagaatgtggcgtcagcggatcacggaaaaaaatcaaaagatccatctgattatgttcaatctgggaaccgagctgctgctttcctccaagatgtcccggaagatacttatgaatacttaaattcgtcacattctctaccagaatccctgttgtctccgttgcataaagattatgcttactcaggattcctctatatgcgatacagaaattctgcatcagtttcttctttgcatcatgtgctaccagtcctatgttcataaatgtcaacctctctttactgatatttattaggttgtaaccctacattcagtacgaaccctatccccatataaaagcatacaattgaggtcaggccataacttacaaaaggaagggaaagtcctgtattcggaaagatcatcgtcgtaacactgatattgataaatgtctgaatccccaccagtgatgccacgcctccacagatgatccgtcctccggtatccttcgcctttagtccgatcagaatacaatctatcactatcaataataacaaaaatataacgacacaacaacccacaaatcctaattcttcaccaataattgcaaaaataaaatctgtctgaggctctgatacaaagtttccatttttaacggaagtagcttcatcattatcgtatccttttcccaaaagctgccctgatccgattgctttcactgaattaagctgctgataggaatcctcatctgtatacttttcaggttccagccacgcaagaatacgtttctgttggtaatctttcagcaatggctgattcggctgtactgcaatcgtcagaaaaatgataactgccgggatcagaatcagcagtgccggtccgacaattttataactcagtcctgcaatataaagcaatgcacagaataaagctgcaacacagatcgtagttgaaaggttcggctgcattacgatcaatgccagtgttggcagaatcaataccactgcctgcaggatcgtcttcggacttttaatactctcttccctgtccattaaaaatcttgcaaagaacaaaattgtcagaattttcgcaagatccgaaggctgaaactgcacgaatccaagatccagccagcgggttgctccatgggaagatgttcctaccagcaagacggcgatcagcaggatcagattgattccataaagcagccagtaaaaattcagaacccagttataatcaatcagggaaataacgaccatgaccgccactccaagaaccactccaaggatctgccgcgtcatatactccggtcttgcacttctgaccataaagattccgatcacagaaatagcaagcaccagcacgaccaggctgaatttgtaatctcttaaactgtaacgttgtttcatattggaaaatagctttttcaatgattttctcctgtatattttatatgtatatcgttccttgtaatctctatcgtcactttctccggatcaagctccatatacttggcgattacctgatacagatcctttgaaagcctttccgtcatatcctgtgtacattgaatcctgtctgacatcaacagatttttcagtctgtcttttgcaatggcaacagaaggtacactcatatgattcccctcctacctgcgatgaaataaacccgaaagtttttttctgattccgctatgccgtgaaaaatccgtcaccggaatctcctctcctgtcagacggcggcagatattctcatatccttttcctgccggactttcctcgcctacgaccggttctccctgattggttgcaatcaccacggattcgtcatccggaatgactcctaaaagatcaatcgcaaggatctccgtcacatcctccactgacatcatatctccttttttgaccatgtccacacgcagtctgttaatcacaagctggttatcccggataccggaggcctccagcagcccgatgatcctgtctgcatcgcggatggaggatacttccggtgttgtcacaacgattgctttatcagctcctgcaatggcattctgaaacccctgttcaatccctgccgggcagtccagaagtacaaaatcatagtcttctctcagatcttccgtcagcttcttcatctgctccggtgatacacttgatttatcttttgtctgtgcagatggcagcagatacagatcctgaaaacgtttatccttgatgatggcctgcttgggtctgcattttccctcgatcacatccaccagattatagacaatgcgattctccagtcccagaacgacatccagattacgaagtcccagatccgtatcgatcacaagcaccttctttcccagttttgccagtccgattccaatattagctgttgtcgttgtcttgccgactccaccttttcctgatgtaataacaattacttcactcatgctgtatattcctcctgcctctttgtatgagcatttaatctgtcaatggatctaagtagatgcgtcccccgtctactacagcaatcttcggtcctctcacgttcagactttcctgtgagatcaactggcgttttgcttcaatatctccaatacaaagtcttttcggctgcatggacaatgcgacgatataagcatctctgttgtcatacgctcctgcgtgtacagatccgtaaagatctccgacaatgactatatttccctttgagaccacttttgctccgggttctacatctcccaggatcacgatacttgattcactttccagtacctgacgctttctgagcgtccctttatagaactgaccttcccgcttctgtatattggaaagcgcctgttctactatgcttctgtacatcagttctctcttttcatcctgatcgataatgcagagaagctccacgccggtcgtctccgtaatcgtctggatcagtatttcttcctcagtggcagtcagagtccttcccgtaaagctgatcgccatccgggcatttttaaaaaatcctgccgcatctgtgaatttttcgactaccgccttctgtatctcctcaaaaggaacatccgggttcatgcggagttccatcccgtatcgattgctttttatcgtcaccagcctgtccatactaaaatccccctgctcttaatctcctgaaccagcctttccaagtgatgatgcttttcctgtaatcagatctttcgctgcattggcatcaaagtatacttttgtgatatcccgtccgatttctgccgcataattggaactgtatccattggcaatacggactgtgatcgcgatctgaggatcatccgcaggtgcatatcctgcaaacagaacgtgatccggatgcactttactctgctgtgcagtaccggtctttccgcccatcgcaatctccatttttgaaaataccgatgaatttttcaccatgctttccataccgttatgaaccaggtcccatgtggaggagcttacttcatccatctggtttacgacttccggttcatactctttgatcagctttccatcagcatctgtcgtctttcctaccagagagagcttatatacggttccccggtttgctacagccgtcacataacggttaagctggcttactgtgtagttgttcgtaccctgtccgattgcagaacgaactgcatctgtatcagagatctgtggatcggactccgggatttccacccctgaagtctgatccagtccgaacatgcttgcgtatttttcaagtttttccagtccgacactgctatcataattcccattttcgtcctgtccgagtctgtaacccacttcatagaagaaatcattacaggaatgctgaattgctcccactacattcagactgccgtgggcacttggatagatccagcatttcggactcggcgtgatcttgtcaaattcacccgtacatggcagatacgttccaccaccgatcacaccttctgtcagacctgctacggaagacatcatcttataggttgatccgggtgctgtcttttcctgcgttgccctgttgtagaaagtacgtgaaagcccggtacttaactgtacataataatctgtatccatcacattggataaccggttattatcatatcccggataagaaacacatgccagcacttttccggtcttcggatcggtaacgactgcccctgcagaacacggctccagagccaattgccccggtgtgatctccagattctgaatctttcctgtcagccaggaaaaagcaccgatactgccgcttaaaagaccgttatatgcagactcatccatcggaagtaccccctgttcgtaaaggatcgcacaaacctgatttcctgtaacacttcctgattttataagattttcatagagaagtttgtcgaaactgctgtcatttttcaaataatcctgcagatagttcaaaatctcctgataaatctcctctgaactcgaataagaattttctcccagctttgtcgtatcgatccagttctttgaaattgcataattcagatacgtgtaaagactgattacttcatcttttgcccatgaaatataagtatcatcatttttatcgatcagatctgaattaaggatgcctgtattttttgtaagcaccgtatcacagacatagtccatatagcccttcatttcatcatccagatctttgtatgccgctgcatctttgttctgcatctgggctatgatcgctgcgaccgcttcttcccgtttcggctgaaatatactgtaaaccgccttttctgctgtctttgcatcatctttcacaaaatgtcctgtatcaataatactgttcccgatcagattataatatgcatccccaaccggaatgatcagatttttggaatcactgacattggatggatcataggtcaggacattctgaagtttggcaagaacgattcccgccactttttcttccaacagcttataagtattttcctgcagattcttatcaatcgtcagataaacatcatttcctgcctccggttcttttctgctcacagtatccgtcacacgtccgagattatcaacatagacggtcgtttttccttttgtaccctgcagcacactgtcaaatgtctgctccagtcctgcctttcctacagtatccgaaagagaatatctctttttatcatcctctgaaagagcatcatactcctcctgggaaatctgccctgtataaccgatgattgatgcaaaatactctgcatccgtatattttctgactgaatcttccgtaatatcgattccggtcaggatatccttgttctccatgattgcagccgcagtttcgtcactgacatccgatgccagcgttgtatcaatgtactgctgaaaactgttcaggttcattgcataccgcatattgatcatctttaagatataagccgcatccaggctggattcatccagtccatatccataccgctcatctgaacagagataatggatcacatccgctgccgtctgatttttctgcttctttgtcagctgatcgatcttcgcttttccatatacatccgcaataaaacgcagtctctgtgtctcactggtctgtgtaaactgatattcccctgccgaatccagtacgatcccgaaactggaaatcaccgaatctccatgctcttcaacaatcgacagaactttatccaggattcggttgatctcctgattcttctcggcacgccttgttgtcgtaatcgcattctctaccgtggaaagattgatcgtcaccgaatatgcgagcttgttatatgccagcagttccccgttccggtcataaatatttcctcttgttccctggatcgtgcttgtacgtcggatagacagctcatagttctgcagataatcctcccccttcacgatctgcagatagaaaagtctgccgatcagaattgaggaactcaagcagaataccaggatcagcatgaccagtctggaatttaaaagatacgcccccgcctctttaatcctgtcccaaatatttctaaacaaatttacttgcactccttttctcttcagcttccagtttatgatttacccacaggatcagcggatacacgatcagcgtaaccatgatcgtatagatcagttccggcacaatgatcctgcccagataatacgggaacttaaaatcacttttcagaaggaacatcagaaaatagatcacgatcccatacagaaactcactcagtgtgatcaggaacagcggaagtttgatatcctcatcaaagaaaagctgctcaaacaggccattcaatgctcccaccagcagatagatcaagccgtaaaatccaatgatatctccacactgaacatccagtaacagccccgctgccagtccgatccacattccctccttcggccctctcataaaaccaaaagctgctgtaacgatcagcagcaggtttggtttgatcccggccaattccagatgagaaaataccgtactctgaagaagataggcagccagcaggatcactgctgtcgtgataaatcttttaaacttcaacatcttcatttccgtattcctcctattttttttctcctccggtcagatctgctttggtggatgtaataatcagtacctcctgcagatttttaaaatcaacagccggtgtaatatatccggaccgggtcagattattggaatcaaccgtcacttcactgacatatccgatcaggattccctgcagatacttgtcactgatataagatgtaacaatctgatctccaacggaaactgtattatcattattttccatctggctgaaacggatctgtccgtcactcatcagtgaaagatctccgctgaccacgcaccggtcagatgtagacaataccataccgctcacattgctggagtcatctacgattgaacggactttcgcccaggctggccctacatctgtcacgattccgaccagtccgcttcctgccataacattcatatcttttgcgattccgtcattgcttcccttatcaatggtaaatgtactgaaccagttgcctgaatcatttccaatgacatgtgctgctgtcttcttataatctgaatagctctggtctaactgatataactcctgcagccgttcaagctcataccgttcctgctggagattattgttctcgatcaccagggaatccacctgctcctgaagctttttgttctcagcccgtacttctttcagggtctggaaattatctttcatatctcccatccagcttccgatatggttgattcctttctgaagcggaactaccgtaacctccgcgatcatcttaaaaggtccttttgtcttttcagaaactacggataacgtcatcattaaaatacaaaaaacggaaagtccgatcaataaatatttattaaaggctgatgcctgcgtcttcttttttttcataatcttatcttaaccacctataattctgatctaacatagaatagcttaattttttataatactccttgtccagtatgatcttctgaagccctttcaccgcacataattccgggtcaggtaccgtaaaaaccttcagtccggtcctttctcccagatatgtaggaaagcccttcagacctgcaacaccaccggtcagatagatgcccctggcctcgatcgcccttctgacatccggcggggttcgcgtgagcatggatcggattgcctctgcacattcttccaaaggctccttgaccgccgcacgcacaagactgatctgtatctcagtatgtgccgggacaccggaagtcagatccctgccatagactctttttgcatccgctgttccgtcttcaaatactgcaaattcttttctcagacgttcagccgtgcttttcccgatcaggaactcccggtttctcctgacccgtccggcaatcgctgcatccagcgtttctccaccggtcttcagcagccggttcatgaccattccgccgcgggaaagcaccgacaattctgtagtgccgccaccaaagttggcaataaaaatcccggtctcattcatcacatccagccccagtccgacggcatctgccagtccccgttccacaatcctgactgactttgcctttgcctcggaatgcatcacaagatcgtaaaacgctttcttttccacttccgtcacatcggtcggtactgcgatcacatattccgctccacgggcaaactgatgatctgtcttcagaagactccccagtaaatactgcatatcatcaaatctcgcgattactccgttcttcatcggaaaaaggatctcaacattctccggtgctttttcatacatcttatacgcttcatttccgacggaaaaaatatattttttatccttcatggctatcacatttttttcccgccagatccgtactttctttttatcaaaaatcttgatctcgtatgtcccaagatccagcccatatatattcctggccattctaaaaccaaccccttaatttcttaacccggattcccgcaaaagaaacccttttccctcagacttatataacgattatctcctatgatgatatgatccagcagctcgataccgatcagatctcctgcttttctcactctctgcgtcagaagaatatcttcctgactcggagtcgggtcaccacttggatgattatgaagcagaatgatggatactgcattcttcttcagagcttcaagaaaaagctccctcggagatacgagcgttgcattgaccgttcccactgatatatcactggctccgatcagttttgcttttgtattcagcaaaagcagcttcatcacttctttctgacgatgccgcatatcttccatatagtaacgggcgatcgtattcggagaagaaaaatccagaccctccaaagcctctgccttcgccatccttcttgcaagctctgcaaggcagcggatctgaattgctttcactttgccgatccccctgacctgccgaagctgttccactgtccattgcggaaggttcacaagaccaccccgatctgtctccggatgcaggatcttctgtgcgagccggagtgaattctccccttttgttccggttcgcaaaagaactgccagtaactctgcatctgtcagattctctgctccatactgttcacacttttcataaggccgctcttcacggtacatctcttttatcgtaacattttcatttctctgcatctatatcatatcactgcgacgatagaatacaacgactaattttagcacagtttccaaaaagtgtatagagatgaatcattaaaaaaatgtgaatttaagaaaccttaagattcataacgacggatgatctcttccgcaactttgatcccgtccatggcagcagacgtgatccctcctgcatacccggcgccttccccacacgggtagatccaggatattttttcagaaacgcactgttcatttctctcgatccgcaccggtgaagaagttctgctttccacaccactcagcaatacatcctctccggcaaagcctctgatcttatgatccattgcaaggattccatcctcaagcgacagcgaaagttcctttgggaagatctcccggacatttgccagtgtatacgctcctttgatgcagggacttactgttccatattctgtgctgatccggttcttcctgaaatcctcaaatctctgtaccggtacttttccctgtccggctttccaggcattttcctcaagctttctctgaaatgcgattcctgcaagagcatcatctgatccaaaatcttccggtgtcacagttacgatcaccgcactgttcgcattttttccggcccggtcgctgtagctcattccattgaccgcaaggcggtgttcttccgaagacgcattgaccacataccctcccggacacatgcagaaggtatatacgccccgtccgtttgtaagcttttctgtcagcttatatgcggctgccgggagttcttttccccggcttcttccgtactgcgactgatcgatcagttcctgcggatgttccaccctgacccccactgcgaaagatttggcacgcatcggaagctgatgccggttcagcatctcaaacgtatctctcgcactgtgtccgattgcaaaaactgcaactcctgccggaatttcttctgttccattaacctgaaggcaatgctgctccacaagaagatctgtcacctgagaatgaaaagaaaattctcctcccaggcgtaaaatttcttcacgcattttcctgacaacttcaatcaggatatcggttccgatatgtggtttctgcacatataaaatatcctctgccgccccgaattttacaaatgtctccaggacaaaccggtttcttccgttcttatcttttacaagtgtattcagctttccgtccgaaaaagttccggctccgccttcaccgaactgtacgttggaatctggattcaaaaccccggtttcccagaaatgatccacatctgactttcgcttctccacgtctgccccacgttccagcaccaacggacgatacccctcttttgccagtacataagcacagaacagacctgccggtccgcttccgacgattaccggtcttccgtttaatttctccgttccatgtggcggaacctgatatggacgttcctctatatgcgaaacattgctcccctttttatgctttaacagcatcgcttcatttttcacttttacatccactgtatagacataaaaaagctccggtttctttctcgcatccagtgactgtctgcggatctgataagagatcagttcctccgggcggatgtgaagctgtctgaccagctttttttcaagctgctcttttgtatgtggaatcgataattttaactgactgactcttatcatatgattcatttctccaatctcattttcactctttcgttgctgccgattttcctgccagcacaccactggcaactgcaaaggaaatattatatcctccgcagatcccgtcaacatctacgatctctcctgcaaaatacacccccggaacaagtctggactccattgtatctgcatggatctgccgcgtatcaacacctccgcaacagatctgtgcctgttcaaaggaattagtacctgtgacctgtactttaaattctttgatcagccaggtcaggtgccggagttcttcctccgtcagagttcccactcttttttctttcgggatcctggcaaatttcagccacagaccggaaagctttttatgaaataatccggtcagaaaatgctccgcggttttttctggtctgtttcgggctctttttcttaaaaagtccagcattttctccgtagaaagttccggcataaaatcgatcatcgcctctactttttttccttcatacaatcctctcgaagcatatctgctaacctggaataccgggattcctgaaagtccgtacgcagcaagctgcaattctccggtatcagaagccgcctctgttccatctgtataaagaatgatctttccgttcactcttacccctgcaatatttttaaaaaactttccactgcactgaagctgcaccagtgccgggagaaccggaatcaggctatgccccattttttttgcaatatcataccccgatccatctgatccggtcactggagccgccttggaaccggcacataagatcacccggtctgcctgaaaactttttccctccgcacagatcttaaatccatttttttctctgcggatctccaggcagcggacaccggtatgcacctccacaccggtcctctccagttcttcctgcaaagtctctgccacagaagaagcctgatctgaattgggataaatataaccgtttctgtcctttggataaattcccatctcctgaaaaagctccagaatcttttctgccgggaacttctgcatgaccttccacggaaattccggatcatctgaacggtaacactgcggtgtctgcacccggttcgtatagttgcatcttccgttcccggtcaccagtatcttttttccggtcatctctttctgttccagcagcagcacatcagctccctgctctgccgcggtaaccgcagcagtcattcccgaaactccgccaccgatcactgcgatccgatttttctttttcattctgctccctctcacgcctgttcaatctgttcccggctgactacccctgcatccagcagactctgcaatgatttcaggatgccaagtttcgcatgataccaggtcagtcctccctggaaataaactgcatacggaggcttgaccggaccatccgcacttaactcaatggaagatccctgcacaaaagctcctgctgccatgatcacatcactgtcataccccggcattgcccatggttccggacttacatagctgtccaccggagctgctgcctggattcctttacagaaagcgatcacaccttccgcagagccgagggtcactgcctgaatgatatcatgacgggattcttttccatccggtactaccggatatcccagtccttcataaatattggctgcaaagactgcccctttcaacgcaccgcataccacagtcggtgcaaggaaaaatccctgataaaatgactgcatgactccgagagatgcccccacttcttttcccagtcccggagaagtcagccggtaagcacagttctcgatcagatcttcccgtccggcaatatagccaccgatcggtgcaaggccgcctcccggatttttgatcagagaaccgacgatcatatctgctcctacatcactcggttcaatccgctctacaaattctccatagcagttatctaccatacagatcacatccggtcttctctctttaataaaagcaatcagttctccgatcttttctacggaatagcttggtcttgtctgatatcctttggaacgttggatcgtcaccagctttgtcttttcattcagggctgcctcaatagccggataatcgaaatatccgtcttctaaaagttccacctgccggtaagtaatcccatactccgcaagagatcccttggatggacggataccgatcacttcttccagtgtatcatacggctttccgaccggagagagcagttcatcgcccggacgcagattggcagccagtgccagtgccagtgcatgcgttccacaggtaatctgtggacgtaccagggctgcctcggtatgaaataccgacgcataaaccgactccagtgtatcccttccaagatcattatacccataaccgctcacataattaaagcagccttcactgacccggttctcctgcatcgcccggatcactttcatctggttatattctgcatttttgtcaaattcttcaaaccgttctttcagccggctctctgtcctctgcccgtactcccatacttctctggaaattccaagtccttcatagattttttctgtatccattattcccattttctttcctcttcttttacctgattatctctttttttctgagctgatccagcataaatgtgatcagcttgtcttcatctcttccgacaatacttttatctatccagatcacatcccgttctcttctgaaccacgtcagctgacgctttgcgaaatgccttgtatcccgctggatgatcctgactgcctcttcaagcggatattctccttcaaaatagccgaacagctctttatatccaagcccctgcatggatacgttttcccgtttcagcccgcgttttcgcagtgcctccacttcttcgggcagtccctgctccatcattttttccacacggcggtcgatccgttcatataacctttttctctcatctgtcagaacaaaatatgcggaccggtatgcagcttctttttcccgttctttctcattatgctcagaaatttttgttcccgtctgatgataaaattccaatgcacggatcacccgcttcacattatgacaatggatctggctggctgattccggatctgcctcctgaagcaacttatggagatactcttctcctttttcctccgcgagctgctccagttctttccggtatgtgtgatctgtctcattttccgtaaaatctatatcatacagaagtgcctggatatagaaacctgtcccgcctacaacgatcgggatatgaccacgttcataaatccccttcattgcctcctttgccagttcctgaaaacgtactacgttaaactcctcttccggttccagcacatcgaccaggtgatgaggaactccttccatctcttccggtgtgatcttggccgaacctatgtccatttctttgtatacctgcatggaatctgctgaaataatctctccgcctacagcttttgcaagtccgatggaggcagcagttttgccgactgccgtcggaccggtcagaataatcagcggcttcttttcttctttttccactctgttctccttatacgattcgcttaaatttcttttcaagatcatgctttgtcatggcaatgatcgtcggtcttccatgagggcagtgatatggattatccagggtcagcagttcagcgatcagctcgtccacctcctgtgcagacaatcggttatttcctttgactgccgccttgcatgacatggatgccactttttcatcaatcagttccggtgtcattcccgtggacagtccgtctgccagatcatctagcatttccatcaacagttccttttttgcaatgctgaacagattgtccggcactgcacgtactgcatattcttccccgccaaacggttcgatctcaaatccgatcctggtaaaccggtccagattttcattcagaagctgtgcctcctgcatggataaagacaaaatgatcggagggcttaaatactgggaagtaaactctctggtcttcattccctgcagtgtcctttcatacagtactctctcatgtgccgcatgctgatcgataatatacaatttatcctgaaactcaaccagccagtacgtatcaaagacctgaccgatcagtttatattccgcacgtacttcccgcttcaggaaattttcttcaaataaatccatctgctttggcttttctttctgttcctgcactctttcactgatccgctccatctgctcatcctgccggaagattccatttttatccgaaacttccgcagaagatgaacggttatgataagacagaactctctccctcatctttctgataaaataatcctcatccctgactgtagctcttccggttccggcattgtccggcaccggatccggctgtacctgcgtgcctgcggtgctttccatgctctgtactgctccggttctctcctgatctcctgtcggctgcatgacttcagaattttctgtatgttctgccggttgtgctgccccggttctctccgtggattctgcatctttcttggtatacggattctccccgtaaactgtccggctttctcctgccatggatgcagaagctctcggacgcagaagaaaaggactttcctttcttctctcagctttctcttctgacctgcgtttctcctcttccatcctgacagctaccggttccggtacttctgcccgctgaatcagctccggctcaagcagcgttcgatgcactgcctcaaagactgtcccgtatacctcctgctgcttctgaaaccgcagttccatttttgtcggatgaacattgatatcgacttcttccccgtttaaatgaaaatgaagtactgcaaatgggaacttatgctgcataacaaaatcccggtacgcatcctccagtgcctttgagatcattccgctttttacatagcgtccgttcacgaaaaaattttcaaagttccggtttccccgggtaatgacaggcttgccaagaaatccggtgatacgcagtcctcctttttcataatccagttcgatcagattcgcagcaacgtctcttccgtagatctgatagatcacatccttcagctttccattcccggaagtccgtagtttctcctgtccgttattaagaaactgcaatgccacctcaggatgcgaaagtgcaagatgcatcagcagatcctggacatgtcccgcttcggtcatcggagtctttaaaaactttcttctcgcaggcacattataaaagagctgatgcacaaggaatgtcgttccatccggtgcacctgtctcttccagggaaacctcttttccgccttcaatgacatactttgttccgagatcgctgccctgcgtcttggtgatcacttcggttcttgtcactgcggcaatgcttgacaatgcttctcctctgaaccccagcgacgcaatatgtgacaggtcttccaccgtctcgatcttactggtcgaatgccggagaaatgcacttttcacttcttctttcgggattccgcatccgttatcccggatcctgataaaggaaattcccccatctttaatctccaccgtcacggatgtagaacctgcatcaatggcattttctacaagctcttttacaattgaggccggtctctcgatcacctctcctgctgcgatcttatcgatcgtgatctggtctaatacatgaatatgcggcatcttttcctccttttcatccggtccggctaccagcggttcttcagtttgttctgaagccggtataatgtattcagtgcatcaatcggtgtaagattggtgacatcaatctcctttaattcgtttagcacatcatcatcctttaccgtatcaaataaagacatctgtgcaatatccacttcatcatattttttggatctgccctttttctttgctgtatgttcccttgcagcgatctcgctgacccggctggtaatatcttcgtcacttaactcttccacgatctcttttgcccggttgatcaccagatccggaactcctgccagctttgccacctggattccataactcttatctgcaccgccttttacaatcttacgcaggaagacaatatcgtcccctttttccttgactgcaatgcagtaattattcacattttcgatctttccttccagctctgtcagctcatgataatgcgtggcaaataacgtctttgcacctaataatttactgtcactgatatattctacaaccgcccatgcgatggaaagtccgtcaaaggtactcgttcctcttccgatctcatccaggatcagaagacttttcgatgtcgcattccgaagaatattcgccacctctgtcatttccaccatgaacgtactctgtccggatgccaggtcatccgatgcccctacacgggtaaagatccgatccgaaagtccgatattcgcactctgtgccggaacaaaacagcccacctgtgccatcagagcgatcagagctgtctgacgcatataagtggattttcctgccatattcggtcccgtgataatggaaatccggttctttttatcatccagatacgtgtcatttgaaatgaacatatcattcgggatcattttttccacaaccggatgtcttccttctttgatatcaataattcctttttcattgatcttcgggcgtacataatgattccgttctgccacaagtgccagagaggtaaatacatccagtcctgcgaccgcctttgccgtcttctggatccgctccacctgggctgcgatcgtctctctgacctcactgtaaagttcatactccagtgcatacagtttatcttctgcccccaggatcatatcttcaagttcttttaattccggagtaatataacgctccgcattggcaagcgtctgcttgcgggtataataatccggtacaagatctttataggaatttgtgacttccagataatatccaaatactttattatacttgatcttgagatttttaattccggtcttttcccgttcatcttcctccagcttcgcaagccagtcttttccatccgacttggctctccgcagcttatctacttcttcattatacccttcccggataatatttccctctttcattgcgatcggaggctcttcccggatcgctttcgtcacaagatcgcacagatcttccagtgcgtccagatcttcgtagatctcctgcagcagaggtactttcatctcctctaaaatataacggatcggtggcagcatctcaagagagcttttaaatgccgtcagatccctcggatttgccgaaccataggtaatcttcgtgatcagacgttccagatcataaaccggggaaagatattctctgatctcttcccgtgaaatcgcctgttcttttaattcttccaccgcatccagccttcggttgatctcatttttatcaatcagaggctgctccacgaactttcgcagggtacgtgctcccatggcggttctcgtcttatccagcacccacagaagggaacctcttttctgcttttcccggagtgtctcgcacagctccagatttcttcttgtcgagctgtccagcatcatatattttcccgttacgtatggagtcagatgcgtcaggttggaaagggaatttttctgcgtttccagcagataagtaagtaatgcccctgcactgattacaccacagtcataatcctccagccccagtcctgcaaaacttgaaaccttgaaatgctccagcagtttctccctgcacatggcatcatcaaaataccaggaatccagagaataaattgtaatccccagtttctctttcatcgtatccagatccataccgctcatataaaaagcctcattgcagatgatctccgatggagagaatttataaatctcatccatcagcctgctgccgtccggaagttccgtcacaaaataatctcctgtagaaatatctgcaatggacactccgtaccggtctgcaatatagacaatgcacataatataattattcttcgtctcatccagtgcctgcgtatccaggttcgttcccggagttacgatccgcacgacctcacgctttacgattcccttcgcctgctttggatcttccacctgctcacagattgccactttgtatcctttggcaaccagcctgttcagatatccttccaccgcatgataagggactccgcacattggggcacgttcttcctgcccacagtttttcccggtcagtgtgatctccagttctctggatgcagtcagtgcatcctcaaagaacatttcataaaaatcgcctaagcgatagaagagaatgcagtcctgatactgggacttggtctccatatactgcttcatcattggtgttaactcagccacattcaaactccttcatctgtaaaatctatttttgcatacaaaatgcggtccaaaccataccagatggtttttcctgcacagatagcatcataaagtaaaaaaaccggaaagaaaacccattaaaaaatgggttctttccgatgtattatagcatttttatcttttctgttcaacctgcattacatcatctgcaatctgttctgcagtcagatgattttccagcagtatctctttcacgtcataccggtcaatgaactcttttttcaatccgtagttcagaaccttcatgtcactgtcgccatagaaacgtgcgatcttctctccaaatccaccattgaggattccatcttccagcgtgaccacgatatcatgatctttcttcagttctttcaggagttcttcatccagccctgtaatataatatggattgatcactgtcggtacagttcctgtcttttccccgatcaggtctgctgcctgtcctgcaagtccgtagaatgttccaagtccgatgaccgcaacttttgaaccttttctcgtcacttcatactgatccagtcttctgaaatcctttttcacttcttttccgtctgagatcattgcaccacccggaagtttgatcgcaaccggatactctgtctgctccacgctccagtccagcatggcaagatactcttcttttgttgtcggtgcaagatagactaaattcggaatatttccaagcatcggcatatcctgcaaacctaaatgagtcacatcattcattccataaacagaacctgcaaaaatcacgatcgttgccggatttttatcaatgcataaatcctgggaaatctggtcaaaagttctctgtataaaggaactgtaaactccatacaccggcttccctccgttggctgcgattcctgaagcaagtgccacggcagtctcctccgcaattcccacatccacgaactgtcttccggcttcttttcttttatcttctgtaaatcccatgactgtcggtgttcctgaagtgatcgcaacaaccgtcggatcttctttcatctttttcagaagataatctctcgtcacagaagagtaatcttctccgtctgccggataaagaggcattccggtcttcagatcaaacggagcattataatgccactgctccttgtgctgctctgcaggggcatatccctttcccttcagcgtattgatatgaacgaccactgcatggtctgtatcttttgctttctgaaatgcctcgatcagagcggctgtattatttccttcgtttacataaatataatccagtcccattgccctgaacagattgcagtctgccttgccgtctgtctcccgcagaagttttaaattctggtaaagccctccatggttctctgctatggacatatcattgtcattgactacaataatcaggttgccaccaagctctgcagcataatccagtccttccagtgcctctccgccactcagagatccgtctccgatgactgcgatcacattccctttttcgtctttcaggtctcttccctttgcaagtccgcaggcaaggctgaccgaagtagaggtatgacctaccgtaaagaaatcgtgttcactttcacccggattggtatatcccgatacatcatcataatgttcttcatacagataggcatcttttcttcccgtcagcatcttatgtggatagctctggtgtgatacatcgtacacgatcttgtcctttggtgattcaaatacataatgcattgcaatggttgcttctaccataccaaaattcggtccaaaatgtcctccatgcttacttgccctgacaagcagtgcctgtcgtatttcctctgcaagaaccggcagttcctccaatgtcagtttctttacatcagccggtccgttgatcttctcaatatacattttctaattctcctcttctttttcccaggacaggactcctgtctctactgctttctgataacgtgatattttatatttcagccgttccatcgttgcattgatctgtcgccgctgttcctccagcacttcatactgttcctgtaaaagatctctgcgtgcctcgatcgtactgtcccccatctggtacagtcgcacatattcgatcagtgcctcgatctggacaccggcactccgcatacatactgcctgttctacccagcccaggtctttttcctgataatcccggattccgcccggtgtacgcggaaccggcgggatcagaccgatcctttcataatatcgcagcgtatcctgggaaatcccgtatttttcactgacttccttgatcgtcaacatcgatcacctgccctttcttttttcacaagaactataacacttggagtcagctccaggtcaagaggatttttctatttttcttttttcatcctgtttcctttatattgtctgttctctttttaaaaagttcctataaaatccaactccgatcacagaggtaagcagctctgttaccgggaaagtcagccagaaatactgcaaaccgaatcttgaaaaaatatatcccagcggcacaaaaaacaacacggttctcacgatcgtcagtaccgaactcttcacggcatatccgattgcctggaaaaagaccggaaagatcagggaagtgaccataaaaataaaactgatcccgatgtaatggaatccgttcgttcctattgcaatcacctcgctgtcgccggagaatacagccagcatctgtccaggcagaaactcaaaacacaaggtaccaagaaacatcagacattctcccatgatcagagaatctttcaatacaagcctgcacctttttatatccttcgctgcataattataactgatcaccggaacaatgcaggtctgtaatgctcccaatggaataaaaaagaaggtctgccacttataatataatcccagtgcggtaactgcctggtctgaaaatcccgccaggatcagattcagtccgagaatgtagagcgtataagctgactgcataatgatattggggattccaagctgatagattctttttatataaccggaatagcaggatctcctgggcggtctgtaccacgcttttttcattacgatcaaggctgccacgatctgtcctgacaccgttgctactgctgcaccggagattcccatttcaggcatgcccagcattccaaagatcagaagcggatccaaaatgatattgacgactgcacctgcgatctgagcgatcattggtgtcctcatatcgccctctgcctgcaggatcttactccagattccctccgtaaaaagaccaatgctgaaaagacagacgatcctgccgtatgccaccacatcccggatcacttccggggaatctgttgacataccggcatatgccggcagcgtaacatagcagactgctgcaaaaataatccacaggatcagtcccagcggtgtaccagttcccgccacctcttctgcttttttcttctttccgattccaagataatacgccatatcagtattgataccgactcctgttcccactcccagtgcgatcatgagaagctgcaccggatagatgatcgacaatgccgtaagtccggtctccgaatactttcctacaaaaaaactgtctacaatattgtataatgcctggatcagttgtgccagcatgaccggtggtgcaatttttaacaggatcctgctgaccttttctgttccgtaaaaatctgatgtttccataaaaccctctttattatttagcaaatcaagttttccttcatttacaatagaataacacagatatttatatttttaaatgttgtgtgcgttttcatttacttttataaatatctgtgttaccagttgaaagcatttttcaatttttatcttatctcttattcataccgtaacgcgtcgatcgggttcatgttggctgctttcaccgacggaatcagtccgaagattactccgatcagcgtagagaacaggactgccactacaattgctgtaccgctgatcgccacaggcacagcggaaactcccgagataatatacgccagtgcgattcccaccgcaacaccgatgattccaccaagcagagtcagtactgctgcctctgtcaggaactggaacaggattctcttttttcttgctcccagtgcctttttaagtccgatctctcttgtacgctctgtgaccgatacaagcatgatattcataactccgattcctcctactaaaagagaaatactggcgatccagatcaactgctggttcgtcgaattgctgatctcctggatctgggttgcctgcttcagcagatcttcccctttatatttgatggaatcatcggatacagacagataagaattaaggatctctgctgcatcttcccctgcttttgtcatatcatccgtcgatgtggcacgtactaccacattctgtggttcatcatactgatacagggtcggccatactgtatcaggaacgcagaccattccacttccatcatttgatatatagcgattgtaatcatccatggaattgatcaccggctgggatgccgcttttctggcaatcagaccgatcaccgtaaacggttctcctttcatttcaatcgtctttccgatcacattcccgtccgggaacagattggatgcagaagtcttgtcaagcagtgcaacttttctgttctccaaaaaatctttctctgaaaatccacgtccttttgtaatctgataaccatatacatccagataatcagagtctactcccatgatcgttccgttggaaagggactgggagccgttaaagacggcatcatattcatttcttgtatagtagagtgctgctgtctccactgcatcagattcttttatttcctccagtacatccttactgatcaccggtactccgtccgggacatttccatagctcagatcaatcggccattctccctggtaaagctggatattcactgcattatttcctgctcctaccagattttccttgatctgttcatttgttcccttgattgttgatacaattgcaatgatcgagccgattcctatgatgattccaagcatcgtcagagcagatcttaatttgtggttccagattccctgaaacgcaagtctgatatcttccagcatagaaatccccccttacttataatcatataatgtatctgtcgactttgtcttcgcaccttcccgaacatctcttccatatggaaatgcaatctcgtcatccaggctcagaccggatacaatctccagagaaccggatacattttttccaacttcgacatactgctttttcaatttcccgttatcaccctttttatatacataatattggtttccgtcttccctgacaaacatctgctcaagatagatttcatcctcatcctgggaagaaagatcatcaatactcagatttactccgtctccattggaaagttccgcgtccccatggatcactgctgtgaatggataataagaaagattttcattatttccgtccgaatatcctgttgacggtgaactgctgactccgctgatcgtcgcctcataagtcatcccgctggtccatgacgtaacagtcacagtcattccctctttgatcttatcaaatgctgtctctgccacacgccctgtcacataaaatccatcctcacctacaacactgatgatcggtgtattttccagtcttgctgtctcttcatccgtcaccgattttacggttccttccactgtactggttacgatcgcattgtctaccttttttttcaattgcttcagttccagttcggctgttctctgctccagttccagctcttttaaccgttcttccttctcctgaatctcttttgccagctcttcttttgtaggtccatctgaaattcccggatcatccggttcagatggatcttccggctcggacggtgtatccggttcgtccggtacatccggttcagatggtgtgtccggctggtctggctgaactggcttgatgatctgaccattctttccatccagtgtccattcataaagaatcctggtcggattatccttatcatctaccacctcaaatgtgcagatttctctattttccagcactttcagcataaactgtgcatgaaccgtcaccccaggtgcacagagataccggtaaggtttttcttctgttccgtcaccatcctcattgtacggaacggactcttccgtaatcttatcataaatctttgttccctttaattcttccgggaagggtttaccggtctcttttccatctgtcaccgttgaatcctgatccgatcctgccgttccggtatccgtatttccttcccgagcagtcatattctgcctctgcactgatgctgttgtcctgctcttccctgtatctgcgtttacgactgtatctgttcctgccgcactggtcttcacaactgtattggtccctgctacatttccttttgcaaccgcttttgttccacgcagttgcttcagttctgcttcaatattcttacggtttaaggcaattccctcaatctccatctgcttcatttctttttccatcgttgccagagttgtatcataagcaaccagacgatccccgatcttaaccgtatctccgactttaacatagacttctttcacagtaagagattcatcataatagatatcctggttcatattcgttgttacagttccgtaatcagagatttcagaaccgctggaccagccaccggaattcatattactgacaggagctacttttaccgcttttccgcttccctgcacagccgcaacaatgatcccggtcaacaggactgctgccgcaacgccggaaaccgaaccgatcaggatctttttcttattcttttccattctcctgctcctctccgtccttcaatcttccatctttgatcatcaccatccggtcagcacaccctgcgatctgtgcatcatgtgtgatcatcagcactgtcattccttcctgattcagttctgaaaataattccatgatctgccgtcccgaaaccgaatccaacgctcccgtaggctcatctgccagcagaagatcagggccggtaacgattgctcttgcgatggccacacgctgcttctgtcctcctgataactgcgtcggtctgaaatctaggcgatccccaagtccgacccgttccagtgctgccttcgcccgctccatccgctcttttttggatacattggaataaagaagtggcagtgctacattatccagtgctgtctgttttggcagcagattaaatgtctgaaagacaaatccaatggagcggtttctgatctgtgccattgtccggtcgtcaaaatccttcaggtctgtcccgttgagctgatagaccccggaacttgccacatcaagacatccgatgatattcatcagagtcgtctttcctgaacccgaaggtcccatgatcgcaacatattctccgcgttctacctgaaagcagatatctttcaaaacagggactgtcagtttgtcctgaacgtaatctttatatatatgttctaacttcagaagcattattcgtcctccattcctccatctttctgcagattttcagatgtcccgtcttccggttctgcctctgttccatcttccggctctgttcctgcagttccattcagttcatcttcactgattccactttcattattcactgccgtattttttacaaccgctgcaccttttttgcaatcttcgcttggccacacgatataatccgtattcttcagtccgtccagtacttcccaggtatccatatcctcatttttctcacccagtttgatctctctcttttcaaggcggtcattcttgcctgccacccatacatacggagcatcagaatctgcatctacgatataggaactcatcagccacataccagaatctgtctcacttcctgttccgggttcaacatagacgtgctgtccgagcatcagcccttcacttttctccagtgtcacgtaaaatggatatttcgttgcctgctgggaactgtcagaaccggaataatagctgttctgagaaccactctccggcttttccgtatcaatagaatccactgttcccttccatatctgcgtctcatccactcttgaacgaatcgtcacttccattcccggtgaaagatttccaatattctgctcgctgatctttcctttgatccggtattttcctgtagaaagaatactcataaacggtttcttttctccggtaacatcatcatatccctgctcctcgttaatttcctgaacgattcctgaaatcgtagatgtcacaacagaagattccaggttctttttcatacggtttacttccagttcttttactttataattgtattcttcctgcttcacattggtctgaagttcctggatctgagtcgtataagataactgctcactggccgggacattctttttctccgctgtcagggtcgcaatctggttattcaggttgctgatactgttattgatcttatccagctccagatttctctgttccagtgtcatcgcaagctcttctgtatcgaactcatacagctttgtcccaggctttacttcctgccccttctccacaaaaatctcttttactttctgatcatctgaaagcgtcagtttcagagtatcctgtgcctccacaacgccggaaaaccggttctgagtccccagtcctgttcccgtcagcataccgacggaatctgcatacagcacatcttctccgttcccgcttccttttccggtcactgccctgatcaccagaatcacgaccagaagtactgccagtatgatccccgctattatcagcatctttttctgcttcaggctcaatttcttttctttcacttgcctttccctccttttaagatcacagccattcccaggatctgttagtttcagtatatcttatctcccctgtaaaatcacttgaagaatttcttaattttctccgctgactcttaattttttcattgtctgcgtaaagataaaaaactccttccggaaatatcgtaacatcagtttctgacatttccaaaaggagtttctcatcatttaccggacttcccctcatccggacaatctcttaaaagcagagcattttatctctttttttcttcctccggcagttctttgcggatctcttttgtacggatttctttacagatcgcatcaataaattcatccagggattttgttccttcatttcctgcaaaccggcttctgacagatacggttccatctgcctcttcctgctgtcctacaaccaacatatacggaagtttatccagtcttgcttcgcggatcttgaatccgatcttttctgaacggttatctaccgtcacatcaatatcattctttttcagttctgcacatactttatttgcatactcctcatacttttcagaaataggaagtacacgcacctgctccgggcataaccaggtcgggaactttccggcatacttctcgatcagccatgcaagtgttctctcatagcatcccatggaagttctgtgaatgatatacggacgtactttatctccgttctgatcgatataatacagatcaaagttttcagcgattgcacagtcaagctggatcgtgatcattgtatcttctttgccatatacgttctttgcctgaatgtcgatcttcggaccatagaaagctgcttctccgtcagcctctacaaatggaacgcccttttcacgcagtacttcacgcagtgcttcctgggttctgttccagtaatcatcatcccccagatatttctttttatttgccggatcccattttgacagacggtaggtcacatcatcctgaagtcccagcgtcgataatacataataagcaagatcaaagcagttcttcagctcttcctctgcctgatccggacggattacattatgtgcctccgtgatcgtaaactgacggacacgtgtcagtccgtgcatctcacctgaatcctcggaacggaacagtgtagatgtctcactcatacgatatggaagatcacgataggacttctgcgtattcttatatacatagtactggaatggacaggtcatcgggcggagtgcaaaaacttctttatctttttcttcatcaccaagaacgaacattccgtctttgtaatgatcccagtgtccggaaatcttatacagatctgatttcgccatcaatggtgttcttgtacggacataaccccattctttatcttccagatcttcaatccatctctgcagtttcataatcatttttgttccctttggcgggaataacggaagtccctgtccgattacatctactgttgtaaagagttccatctcacgtcccagcttattatggtcacgacgctttgcatcttccagtttttcaagatatgcattcagttcttcctttttattaaatgcagttccgtaaattctctgaaggcgtgctttatcggagtctcctctccagtatgccatggatgaagaagtcagcttaaatgccttgattccttttgttgtcatcagatgaggacctgcacataaatcaacaaattctccctgatcatagaaagagatttcttccccttccggaagatcttcgatcagttctactttgaaaggctcattcttttcctgcatgaatttaattgcttcttctcttggaagtgtatatctcttcagctcatgtccctctttgatgatcttcttcatttccgcttccagcttatccagagtctctcttgaaaatggttctgcctcaaaatcataataaaatccgtcttcaattgccggcccgattgcaatttttgcatccggaaacagtctctttactgcctgtgcaagcacatgagatgctgtatggcggatcaccttcaatccctccggatcacttgctgtgacaatattcagttcacagtcactgtcaatcactgtcctgagatctacgatctctccattcacttctcctgcacatgcaactcttgcaagtccgctgctgatatcggctgcaatgtcatacaccgattttgcttcactgtactctttcactgaaccgtcttttaatgtaattttcatgttcctgcttcctttctttgttcattttcccgtgtcagggaaattcatggatcagaaaacaacaacatgaaaaaatccctgacactgcatctctacaatgtcagggacgatatcttcatctaccgtggttccacccgtcttcatcttttcctctccggcactctgcatatctgctaaagccggcttatcaaaaagaaaagatctcattcatgatgataacggaatcaccggaccggattagggtcactcagagctggtcttcacataagttccatcaaaatgctcccaccaaatgcacttctctctgcgacttctacttatgctactcgtctcttcaacgctttattcggtgttaattgtaacctctttttctgtatctgtaaagaccctttttttctttttttcatgtcctttatcacgaatttttttacggttctttttgcgaatccggaattgaacttttcttttttgaacttttacatttcccattttcagtttttatattgaacttttttcttttttatggtatgatctcttcatgatttgaacttttaggttctgaaattgaacttatattcatatcataatttggatctgttgatcctgccatcattttaatgatgtcaggctcaaaaggtctgaaaccacgtgtgcttgcacactggtggtagaatgaccttgagacccgccccgatatgagcataaaagtggggcgtaagcaccatgatatgcgaatagcgggtaggattgtgggagtacgtagcacgaaacaatccgttggcatcattgttgggggtttttgaccccaacatcttttaatatgaatttttatagaaaggatgtttctatggttactttttctgaccggctaaaatctgcaatggaacaaaaacatctcaagcaggtggatctcatccgcattgcttcacagcagggcgtgaagcttgggaaaagtcatatcagccagtatgtaagcgggaaaacgattccccggaatgatatccttcattttctggcagatacgctggaagtagatgccggatggctgagctgtaaaacggcagaagatcctgctccgaccggttccatttcacattccacctctgctcccgaaaagagtcagcaggaaattctaaatccaggaggtaataatacgatgcgagaatttaaaaaatcatccaaattgaataatgtactttacgatgtccgcggtccggtcgtagacgaggccgcaaaaatggaagaacgcggcacccatgtcctgaaactgaacatcggtaatcctgctcctttcggattccgcacacccgatgaaatcatttatgatatgagtcaccagttatctgactgcgaaggatattccgcttcacagggacttttttctgcacgaaaggcgatcatgcagtatgcccagttgaaaaagctccctaatgtaacgatcgatgacatttacaccggaaacggggtcagcgaattgatcaatttaagtatgtctgctcttttggatgacggggatgagattctgattccttctcctgattacccactttggaccgcctgtgccacacttgccggcggaaaagccgtccactatctttgcgatgaacagtccaactggtatcctgatatcagcgacatgaaaaagaagatcaatgaccgcacgaaagctcttgtcatcatcaatccgaataacccgaccggtgctctttatccaaaagaggtacttcagcagatcgttgatctggcaagagaacaccatctgattattttttctgatgagatctatgaccgccttgttatggacggacaggaacatatttcgattgcatcccttgcaccggatctgttctgcgtgacgttcagcggactttccaaatctcatatgatcgcaggtttccgtatcggatggatgatcttaagcggaaataaatcaatcgcggcagattatattgaaggattaaaaatgctttccaatatgcgtttatgttccaacgtacctgcacagtccattgtgcagactgctctcggcggtcatcagagcgtggaaagttatatcgttcccggcggtcgtatttatgagcagagagaatatatctacaatgctctgaccgatattccaggtatcagtgccgtaaaaccacaggcagcattttatatgttcccgaagatcgatacaaagaaattcgacatcgtaaatgatgaaaaatttgctcttgatctcctgcgtgacaaaaaacttctgatcgtacatggtggcggatttaactggaaagaaccggatcacttccgtgttgtatatcttccgagaattgagatcttaaaagaagccgtcgaaaagatcggcgactttctgagttactacagacagtaatttctgtatccggtcgtttcattttttattgaatacagatttataaaatgctcacttcccgggcgaaccgattttctgttcatccgggaagtttttcataccaggctattcaggatgagctgccagcagcaggttctctgtatacccgatcatctttattttcctactgaaatattatttctccggcattttcgctgatgtatcccacacagttcatttccacacgcccacagtaaaaaaacaactccggcaaaccagtaatctctgtcgtaggaactgcttcttcctgaaattgtgatgattcctctcaccagacagcccgcagtcagtgttgcaatccatacaacgtataaccaatcccaaaagacaaaagcgaaactcctccaattttcaggatttctctgtataggaaactgtatgctgtcttcagggctgctccctttccctgattttccgcatatccgatcacggttgcccattctgaccgtccattcttgggccgccctgtcccggtccctgcatgctctgcccttctgaataaaccaggctgctcatcgtaattttttcactttccaaaccggtcgtaagagtataggctgccccctcttccagttcctcacaactgatcacaacagaattaaaatccctgaccggtgtataacttaccagcaccgttccatcggtatctttcagtgtaatttcaccactctgatctgtatccagattgatgagcatcgttccctgcgtagaatctgatccaaaattctgtgccattccgctcatgcctgctgcaacgactgttccacctgtgatggtcgctgttccgtcataatccaaagctccgtttccgtcatccccgggacctgatacatagatcacaccaccactcacgctgaaatctccattactgtcaattccgtcaccttttgcatcaatttcaattgttccgccaaggatatcgatatatgcatctgaatcttcctgaaaagtattttcaccaggacgtcccatactgctttgatcgtttcctcccgctgcattcaatccgtcgtcactggatacaattttgatcgttccatcctgtatcgtcacactttgcccttcaattccttcatagcagttcgttatatcaattttcccatccagtacaacggtctggtcatctgcatggattccatcatctcccgaattaatggaataagtgcctccgcagacatatacatttccgttacaatggattccatcatccgccgtggcaagctgatatgttccatctttcagaatgacatacttttgtgccttgattcccttcgtactggtatctgtctctgtggagctggtagaaatatcaaagcttcctccgtctgcctgcaccacataggaagaagaaattccatctcctccggcagccagtgtaagaacacctccggttatataaacaaatccttttgtatcttcatctgtatcctcactgtggatcgcatctgtaccggaagtaatcgtaaatgttccatctgcaatacgcacactttcttttcctgaaagtccctgcttttctgactgaatctgatagactcctccggtaagaacaagatcatcctttgagacaatgccatgggcagcagaggtgatctttaaagtaccacttccattcaatgtcagatcttcccgcgaaaagattgctccgtcaatatttgtatcctcatttccagtaaaagaattggatacaattttatttgtgctaccatctgcgagggttataaagactttgtctgcctgttccacgcagattcctgccccctcttcgtttataatggatacattttccaggatcagttgtgctttttccgttttatctgtatcaacgacaacacttccattacttagcgaaccggtcagaagatacgttccaccttctgtaatcgttacagtctgtccgtccatttttactccgtcactgtcgcattttgtttcttcatccgaaagactgatcgcagtacattcactttcatcatactctgtgtctcgatctcgttcagtaaacatatcctctgtatctaaaatcgcaatatcactttctgatatgattgtattttctgatccggtcgttccgttttttgctgaatttgaagtcccctgggagcatcccgtcagttccaatgcccctgccatcagtacgataatcatatattttcttttcatagagttttcctccatttcattacaatctgcctgcctccttcagatatatttttacaggcttgtagttgtggtttcctgatttttcaccatgatttccagattcccatttctgcaccgcaaatggtcgatcatttctttttcctttgaagtatctttcaggcttaactgataggtcagtttgaaaagacttcccatattggtggtctttacttctgtcagttcataacggctcgtatacgcctcaagcagatcatcaaaaacttccgtatagtccagatcctccgggatcgtgatcaccatggtcttctcactgcctgcgttcttttcccatgcacggatctgcacatagagagccatgaccagagaaaggatcaccgtataaagcactgcataccccagatagcccatcccacttaccagacctgctcccatggcaataaaaatcgctccgatctcttttgcactgcccggcacacttctgaaacgaacaagactgaaagctcctgccactgccactcctgttcctacatttccatttaccatcataatgacgatacatacaactgcaggaagaattgccagcgtcctcacaaatcctgcattatattttgatttatatgtataggctgccgcaagcacgattccaagtagcagtgagactaccacgcaaagcagaaactgatataccgggatcaccgtcactgtactgctgtcaaaaattcctccaaataagttactaaacataatttatttctccttctcttaatagtgttctgtatgcatttccgtattttgaatacgatgtacggaacattttattttctgtaagaaaatgactcagccataaaggaatcgcatgccccacttttatttccaataatgactgatcctcgtccagcaggcttcttccatagatcggactgctcaggtcaagatcttctgttctccataaaatattctgatcaaatgtcatccgcagttcatgatcttcttttccatagaatgcctcacgctcataggacagccacattgccgggcggattccctggtaaagtctcagagcataatccagttcttctccgatctgactttccccgacaacccgttcgccccggcaaagatactggatcgctttttcgtattccgtacagattcgccttttgtagacgacttttttatacttcttctttaactcgataaatgcctcacctgccggctctgctcttccataggtacggagccgcactttttctttatatactttgttctctatggatctgcggatcaacaaatactgtggtgtgtcaaaatacagattacagatggtactttttccatattcatccgggatcatgtactcttccatcacgttctgtaaaagctctttctgctcccgggtcagcagatatttatattcataacgtttaaaaactttttgcactgccattgttctttcctccttacatcctgcattttatcggtcgtaccttaaatcaactttaaattacttttaaagacacaaatactacacatattgcatccatacagtctgcacattggtgtaaatgcagaatttcctggcactggcagctttttctgtgtgtccgggtataaaaaaaagatctgaaaatcatttttatgatcttcagatcttttcctgccctgccacccgggtcttttcttactttctattccggcttgctttctattccggcttgctttctttttctgatttcagtcagtccagcagctcttttaccatttctgcatcaaatacaactttctttttctgttccacttcaatctgatataacgcatttgccgcaatatgctctgccgcctgctccagatcacggattcctgttgtatcggaatacaattcaatcacctcatccagtgcttcgtctgtcatgatgcactcttcttctctcaggctcatacgtttcagtacttttggtaatgcaaatttagagaatatgatcttcttttcctccggagtatagtccggtatatcaatcaccgcaaaacgtgacattagcggtgcactgatctgatccttatcattcgccgttgcgattggataaacacctacagtcggaatcatacactccatatagttatccgtaaatccaagattatcaagaagtgtcagaagcacatctgccggatttccatttccctttcctgaagctgccttatcaagctcattgataataaacacaagattcgactcacccgccatggaaaaggcctccataatgattcctggcttcgcattggaataaatacgggaacttcctgtcaactgttcagggtcattgatcgaactcatatccaatgttgtccacggtaattttaaaatacgtgccaccgcataggcaatctgagattttccggttcctgcaggacctaccagcaacagtccgtatgccggcaatgtatgtgttctgttgatctgaatgatcgtctcgatgatcctttgctttacgcgttccattccataaagctcttcatccagaatccttcttgcctcttcgggatcaatggcttcaaaataatcatttttccattgaatattcatcataatggataatgcccgctgtgcatgacgacgttcttcctgcgacacctcatgggaacgtgccacagcaagatttcttctcgcccagagacggatattatccggtagcgtccttcctgcacaggtcatgaaatcagtaatactctgaatactggtcagcttcatgtcatccccgttctcttctccgtcttcatcttctacttcttccgcaggtgcattgcttgcaaaaagtctctcaatcataaactgcaggaatccatcctccgcagacagcttcgtaccgccaccaaatgcgatctccctgatacgatacacggcatatccgctttctgtattctttcctgataaacgcacattgatatgattttctcccagccatttcaaaaggctgacaaaccgtgcatccacaagcagaatatccgcacttatcgttcctccgtcttcatcaaattcaaaagcagtctgcttactctgattcgtgaaaatcccacaggaatggtgattccactcctttttactgttatccaggacaaggatcggattttcaatggacgcatgatcctcattagatgagaacgtggtatatgtacatacaaccggctttttatcatccggtgcattattaaaatcaaatactggcatcttctgtactcctttttcactttcatttttcttattatagcaagaaactatcagatctgtccagtcagccggacgtattacttgtataaccgtcctgtctatgttatcattaaaacaaattattttaggaggtcattacatatgaaattttgtccgaaatgcgggaatcctactgacgatcatgctacattctgcaaccagtgtggtgctccccttaacgatcagccgaatacagacggaactgctcacagttcttctgattttcagggaaccggaggaacacagaacaattattatcagcagaataactattaccagtcaaccggaggaacaccgttccgttcttcctacgggattactcctcgcagcatccctctttgcattatcctttccattgttacctgcggaatttacggcatttactggatgctgaagctaaatgatgaaatcaatctcctctgtggtgatacaaatgcgacaagtggtgctttggttgttatcttttctctgatcacctgcggtatttacggattctactggatgtataaaatgggagagaaatgtgattttattaagggagttcagggaagttccggtattctttatctccttcttggaatcttcggactcagtatcgtcgatttctgtcttattcaggatacgatcaataagtctgtctgactttcttaaaaagaaccgcctgcaaagttaagatttttatcttttcttcgcagacggttttctttttactttttttctgcctttcggctacgtagtcccgaataaaaagagcggatcttttctgtcagaatcgtaagatatcttaataccggttccgttgcaatggcaaatacgataaatagcatgatacattttgtcgtcattccggtaatggcaaaaagatcattcaggaaaatactacagaacagaagtcctgcaatacatcctgtcagaatcgcagttctcaacatattcatcggtgcactgatcttatacaggatcataaatcctacgattgccagcagcattgtcgctgccgtcgaaatatctgtttctcctaccccaaaagtttttccaaaaatcacaagtgctccgaccgctactgcatcggtaatggcagccggaagtgctttcaagaatacattcgtaaggaaatgacctttaatgatattcttattcggttccagtgcaaggaagaaagcagggataccgatcgtaaacatactgatcagggaaacctgcgatggctccagtggatacgtgaacataaatacaactgacatcaggcttaataaaaatgagaaaatattctttacaaggaacaaacttgctgaacgctggatattattgacaactcttcttccttccagcacaacctctggcatacacgaaaaatctgattccagaagtaccagttgtgatgcctgtgccgccgcctcacttccagaagccatcgcaatactgcagtcagcatccttcaaagcaagaacatcattcactccgtctcccgtcatcgccacagtctttccggcctctttcagtacctgaacgaactgccgtttctgattcggggttactcttccaaagactgtattctcaagtactgctttctttacatcattgatggattttaattcagaagcatccacgtactgatctgcatttgctattccggcctgctttgcaacctttgatactgtaaccggattgtctcctgaaatgacttttacctccaccccttgttcggtaaaatactcaaacgtctcttttgctgcctctctgatcggatttgcaagcaggatataaccaagcggacagattggatttctcagagcctttccgtcgatcgtaccgtcataagttccaaataccagtactcttgcaccggtcgatgccagactggttatttttgcttcataggcttcatactcatccagcagtacaaattccggtgctccaagcacatatgccccctcttcaaaagtaacactgctgtacttggtcgctgaggaaaatccggtctttgcgaccggctttgcccctgatacagaagtaaaataagcctttaccgcagccatcgtaatattatccttcgtcatagcggctgcaaaatctcctaccagcgtttcaagcggcttcattgtatccgggtcatactgctgcgttgggatcagtttctgcacctgcatcgtattttcagtaatggttccggtcttatccacgcaaagtacatcaacccttgccagtgtctcaatgcatttcatatcatgcagcagcacctttttctgtgccagtctcatagaactgactgccagtgccacacttgccagcagatacagcccctccgggatcattccgatcactgccgcaaccatggacgtaacactggatcggaacgaggaatgctgaaagaaaaatgcctgtacaaaaaggatgatcccgatcggaataatcgcaattccaacgcactttacaagacgatccagcgaacggatcatttccgactgctctccctgctgcatctctttggcttccagcgtcagccttgaaatataagaatcctcaccgactttatcaagtctcgcgtggcactgtcctgaaacaataaagctccctgacatcagcttcgatccctttttctttgtgatctcgtcggattctccggtcagcagtgattcattgacctgaacttcccctgcacagacttctgcatccgcacagacctgggcgcctgccttaaaaataacaatatcatccacaaccagttcttctgcatcgatcatggatttttttccatctcttacaaccatcgcatgaggagcattgagcatggtaagatcatccagtacctttttcgcccggatttcctgaataattccgatcagcgtattggcaatgatcaccggaagaaatgtcagatccctgaacgcccccaccaggcagagcaaaactgccagtacaagaaagatcaggttgaaatacgtgaagacattctcctgtacaatctcctttgtagtcttggatgttgaatctaccgcctgattcgtccagccatgaagcttatgttcctgcacctgctgactggtcagtccctttctgtagtccggcgtatatcgcgtcgtcggcattcttttctttttttcctctgcctcaacaggcttcctttttcttctggccgctgacatatcaattctccttttgtattctttctgcttcagcaataaaaattgctgccctgcataaagtaagtatgccccgcgatgaaactcgcgaggcacaccacatctgattttattttaccacattcatccgcattttccactatgtttagaaaaactttaactaatcttcagactctgtttttatttgttctcctgaaatctctttacggttcaggatctgcataaactcttctcccgtgatcgtctctttttcataaagatattttccaagttcatgcagtttcatcttatttttctccagcagatccatcgctgtgtcatacccttccctgactgtctctacgaccatatcatcaatcgtggcagccgtctgtggagaacagcttaaggtactgtcaccgcccaaatatggattattctgggtttccagtgccaccatgccaaaacggtcgctcatcccataccttgtgatcatggcacgtgccagttttgtcgcctgttcaatatcgttagatgcacctgtcgtgatcgaatcaaagatcagtttctcggcacatcttccacctgtcagtgttgcaatcttattcaccagctcttccctgctcataagattccgctcttccgcttctacctgcatggtatatcccaatgctcctgaagttctcggaatgatcgtaatctttgtcaccggtgcagaatgggtctgcaatgcggcaaccagtgcatgtccgatttcatgataagatacaatcagtttttcttttgcggaaagtacctgattcttcttctgatatccggcaataaccgtctcaatactctcttcaagatccgcctgtgttacaaacttccggttctcacgaaccgcccgcaatgccgcttcattcaccatattcgccagctccgctccggatgccccggatgctgctcttgcgatcgcgttaaagtcaatgtcatctcccagtctgacctttttcgcatgaactttcaggatttcttctcttcctttcaggtcaggaagttccaccggaatccgccggtcaaatcttcccggtcttaaaagtgccggatcaagactgtcgggacggttcgttgctgcaagaatcacaacacccttggatgcatcaaatccatccatctccgtcaaaagctggttcagcgtctgctcacgctcatcatttcctccatatccggcattatctcttttcttaccaatcgtatcgatctcatcaatgaacacgatacaaggagctttttcatttgcctgcttgaaaagatctcttaccttagaagcacccataccgacgaacatttcaacaaattcagaacctgacattgagaaaaatggaacatttgcttctcctgccaccgcctttgcaagcagcgtcttacctgtaccgggaggtccgacaagaagtgcacctttcgggcagatggctccaatctcctgatatttctttggattatgaagaaaatccacgatttctgtcagcagttcttttgcctcatcttcccctgcaacatcgttaaatgtaattcctgtcgtagactcaacatatactttggcattgctttttccaaactgcataaatggatttccggcagtacctccccccatctttttcatcagacgctttgcaaggaactgtcccaatacccagaaaatcacgattggcagaacccatacaagcaggaaactgacaagcggattcatctcttcctgtgcaattcttccaaattcacatccggcttcttccagccggtttacaagatccgggtcttcaaacgtcgttgtctcatagtaattcggctcagccgctttatccgtaaaataaatcgtatcgccatttaattctactttggacacttcttttttatcaaccatcgtaagaaatgtaccgtaatctacatcttttactttatgatgattcatcagattgggaaaaagaaatgtattaagcagtatcagtatcaccagagcaatcaggtaataaaatatcagaggttttttgggtttctctacttttttcaatttgactcctccttcgttctgtcattttatatctgaagatccagttctatttccctgcttttacccagattgctttcaataactgaatcactggtatattcaatgccgcaagcccatacacagtaaagagctgtgtgaagctcagtgtctgtactttaaaaatcgtatgcagtccagggatcataacgactgccgtcaccagcaggattcccagtgcaaatgcaccgatcagatacttattatctgccaccttctttgtaaatacaaccggtttgttcgatttacagttgaatccatggaacagtcttgccgaacagagtgttgcaaatgccatcgtactcgccagcagtgcatttccatccctgtatccgatcagaaatgccgtcatggttgttgcacagacagatactccctccactgcgatcctcagcaaaaagtctttcgtaaggattgactcattcaacggtcttggtttctcttccatcacagctttggaatgtggctcaagtcccagtgcgatcgccggaagactgtccgtcagcagattgataaaaagtaaatgcaccggtgcaaacggaacaggaagtgcaaaaattgacgcaaccagtactgccaggatcgccccgaaatttcctgataataaaaactgaatggcaaatttgatattcctgtaaagatttcttccattttcaaccgccttcacaatcgtagcaaaattatcatctgtcaggatcatcgctgcagcatccttggacacttcacttccggtaattcccattgcaacaccaacatctgcctgctttaatgccggtgcatcattcacaccatcccccgtcatggaaacgatatttcctttttcctgccatgcccgcacaatccggatcttatgttccggcgacactcttgcatatacagaaattccttctacaaaatccttcagctcctcatccgacatccggtcgatctgagatccctcacatgcttcagattcttctttcaaaatcccaatcctttttgcaatcgccgctgctgttactttatgatctcccgtgatcatgattggacggattcctgccctcttgcactcggcaaccgcagcagcggactcttccctcggtggatccatcatggcaaccagtcccaggaatatcaggtgatcctcgtcctgaagcgtcagttccatctcatctgacacaactttatatgcaaaagcaagtacacgaagtccctcttctgaatacttccggttttgtgcctcaatccttgcacggtcctccctcgtgatctcatacacttcatctcccaactggatcagatctgtcctgtccagcagcacatccacagctccttttacgatcatcgtcgggattccgttcaacatatgcttggtcgccatcagttttcggtcgctgtcaaacgggttttcactttctcttggatactttttccgaacctcctccggatccatccccagcccacttgcaagatttaaaagtgctgtctcagtcggatctccaatctcaataccatccgcattggttgcatcgttgcagagaatactgctgatcatcagacggctttgtgaactgtctgtcagatctactgcaccggcaggaatactcttttcatccacgtagtaatcttccacggtcattttattctgcgtcagtgttcccgtcttatctgaacagataaccgatacacttccaaggccttccactgcctgcaattttctgatgattgcatgttcctttgccatcttctgcgtaccgaaggaaagcacaatggtcacaatcgaactcagagcctccggaattgctgcaactgcaagagctactgcaaataaaaatgcatctccgatattatctccccgcaggatactgattccgaacaaaataccacagaatacaagaatcaggatggaaagcttttgtccgaactgatccaggttcacctgcaatggagtccgcttttctgaagtattcttcagaagtcctgcgatctttccaacctctgtctccattccgatctcagttacaagaaatgaacctcttccataagtgacaaaactgcccgaataaaccatattcacccggtctccaagtggtacattttcttcttttataatcgtcgttgtcttttctactcccaggctttctcctgtcaatgcactttcatccactttcatgctggcacactctaaaagccttccgtctgccggaatataatctcctgcttccagcatcacaatatctcctactgtcacttctgcggaagggatctgcacaactgccccgtctcttagcaccttcgcctccggcccggaaagcttcttcagacttgccagtgactgttctgccttgatcgtctgcactgtccccagtattgcattcatcgtaatcacgatcaggataactgcggcactctccacatctcccataaatcctgatgccaccgcagcaatgatcagaataatgaccagaaagtccttatattgttccaaaaagatctgtaagatcgtctttttctttccctcgaccaattcattcggtccatactgttcctgatgttctctcacctgttcattcgtaagcggttctaaagagccatttacttcctgcagcacttcttcacctgacatttgataatatgatctcatttttgctcctcctgcatttacctcataattataagatagcaaacctgccaccgatacctgcttctgtattctcttgtataaaaaatgagacttttattgcacctcgatatgcaataaaagtctcactatttaatcacgatacggatgctaaattccatcggttctggcgacatcgcaaacacttattaaaaagtgccagttactccctcttatttattagatataataaagattctattctaaattgtcaataaactttatccttttttcataaagctttaatatcttttaacaaaaagaaaaacccgggaaacctgcatttcccgggcgaattgatcactttctctgaatcttaaacgattccctgagctgtcattgcatctacaaccttttcaaatccggcaatgttagcacctacaacgtagttgcccttgaaaccgtatttctcagctgcatcagacatattatggcagatattaaccatgatatttttcagcttgctgtcaacttcttcaaatgtccagctcagacgctcgctgttctgggacatttcaagtgcagatgtagcaactccaccagcgttagctgctttaccaggtgcaaagattacaccgttcttctgcagatactctgtagcttccagagttgtaggcatgttagcaccctcgcaaactgcgatgcatccgttcgcaacaagtgcctgtgcatcctcaaggtgcagctcgttctgtgtagcacatggaagagcgatatcaaccttaacattccatacacctcttccctcatgatactctgagtttggacgatatttcttgtactctgtcagtctcgcacggtttacttccttgatctctttgagggctgcaacatcaattccttccggatcatatacccaacctgtagaatcacttacagtaacaacttttgcaccaagctgctgtgctttttccgtagcataaattgctacatttcctgatcctgaaactgctacagtcttacctgcaagctcgattccgttgagtttcagaagttcctctgtcagatacagaagaccatatcctgtagcttctgtacgtgcgagagatccaccgtatgtaagaccctttcctgtaagaacaccttcatacagtccacggattctcttgtactgaccgaacatatatccgatctctcttgcacccgtaccgatatctcctgcaggaacgtcagtatcagcaccaatatatttacagagctctgtcataaagctctggcagaatgccataacttctctgtcagattttcccttaggatcaaaatcagatccacctttacctccaccgatcggaagtcctgtaagagagtttttgaaaatctgctcaaaaccgaggaatttgataataccaaggtttacggatggatgaagacgaagaccgcctttgtatggtccgatcgcactgttgaactgtacacgatatccggtgttcacctgtacctgtccgttatcatctacccacggaacacggaatttgatctgtctttcaggctctacgagtctttcaagaagagcttctttacggaatttttcttcatttgcctcgatcacaacacgaagggattccagcacctcttttactgcctgatggaattccggctcagccggatttttctttacgactaattcaatgacttcatcaacgtatgacatttctcaattacctcctaaaataaatataacgcgaagacctgtcgtctgccgcgttcgcttgagacctctttgtctactcgtttattttaaaatctaaatgaaagattgtcaacaatttattgcatcattttaaagttttatcactttaagccactgaaattgcataaacaatactgacaaaattcatcttcctataattcctctaatttttatcaggaaaagttttgaccgtctgcagcattttatttccctgcatagctttaagatatcaacacctttttatatcatgaaatttttcccgacatataaaaaagcgaagcaccattccggtactccgctcatctgcacatattagttatatttacgttttctagcagcttcagatttctttttacgtcttacgcttggcttttcgtaatgttctctcttacgaatctcctgctgaatgccagcctttgcacagtttcttttgaatctgcgtaaggcactatctaacgtttcgttttctttaacgattacatttgacatagtctcacacctaacctcccctccagccttgtattgtgcatcatacgactgttcgggtatatttattgcactgctagttattataccataaatttttcttccgtcaactatttttattcaaaaaagttaagaaaagtcaagatttttataattcacacttttttaagtcacttattcttataagtcaggctttttcagtttaatggatctgctctgcaaggacttcttctgctttctcaagtgcctgtgcaatacctgccggattcttgccaccggcctgtgccatatttgggcgtccaccaccgccaccgccaacaagacctgcgatcgcttttacaagattacctgcatgagccccctgcttcatcgcaccgtctgtcacagttgccatcaggcttactttgccgtcatttccggatgcaaggacaaccacaccttctcccagtttctctttaaactggtctcccagttcacgaagttcattcatatcaactccgtcaagctgagcagcaagaagtttcacacccttcacttcttttacctgatccaggacattgcctgctgcttcctgtgccattttactctttaagctgtctacttctcccttcagagctttattctctgcctgcagatgtacgatcttctcagccagattctcaggagacgccttcacaagctgggcagcttctttcagaagacattccatctctgcataatacttcatcagtccgtctgatgtcagagcctctatacggcgtactccggctgccacaccgctttctgaaataatcttcagagccgtgatctcagaagtattcttcacatgggttcctccacaaaattcaactgaaaatccgcccatatctactacacgtacaacatcaccgtacttttcgccaaataaagcctgggcaccggtctttcttgcttcttcgatcggcagattctttgtgactaccgcaagggcattctggatctgctcattcacgatttcctccactttctttaactcttccggtgttaccgctgagaaatgagtaaagtcaaagcgaagtctgtcctcatttacaaaagatcctgcctgctcaacatgacttccaagcactgtgcgaagtgctttctgaagcagatgcgttgcactgtggtttctttccgtaagagcacgcttctttgcatccacttccagtgtaactgcatcaccgatcttgatcataccctttgtcacatgaccgatatgtccgacctttgttccagcaagatgaatacagtcctctacaacaaactcgccttctgctgtccggatcactcccttatcagcctcctgtccacccatcgttgcatagaacggagtctgctcaacaatgatcgttcctttctctccgtcagacagagcgtccacgacctcgtcctctgtagtcagtgcggaaacttttgaatcaaatgtaagatgatcgtatcctacaaattctgttccgatctctgcatccagttcatcatagacagatgcttcttttcctgtataggaatgcgttccgaatgtaccctctgacttggcacgctgctcttcctgagcctttttgaagccttcttcatcataagtcagacctttttcctccaggatctcacttgtcagatcgaccgggaatccataggtatcataaagacggaatgcattctcaccggagagaacgttctcacccttcttctccatctcagcttccatatctgcaaggatcgcaagtccctgatcgatcgtcttattgaagttcgcctcttcctttgcgatcacattaaagatgaactctttcttctcttccagctccggatatccgtcctttgatccttcgatcacggttgtagcaagttccacaaggaacgctccctcgattcccaacagctttccatggcggcacgcacgtcttaacagacgacgcagaacatatccacgtccgctgttggatggaaggattccgtctgagatcataaatgtcacggaacggacatggtctgtaacgacacgcagagagacatctgtctcgtgatctgttccgtactgctttcctgaaaggcggcatacatggtcacgcagagccttcattgtatcaatatcgaacatggaatctacatcctgtacgatacatgccagacgctccagccccatacctgtatcgatattcttctggatcagatcagtataatttccatgaccgtcattattaaactggctgaatacgttgttccagatttccatataacggtcacattcgcatccgactgtacatcccggttttccacatccgtacttttctccacggtcgtaataaatctctgaacatggaccacacggacctgaaccatgctcccagaagttatcttccttaccgaaacggaaaatacgctctgcagggattcccatcttcttattccagatatcaaatgcttcatcatctgcttcatagactgacggataaagtctgtccggggcaagtcctactacttctgtcaggaattcccatgaccactcgatggcttcattcttaaaataatccccgaaagagaaatttccaagcatctcaaaaaatgtaccatggcgtgctgtctttcctacattttcaatatctcctgtacggatacacttctggcaggtagtcactcttcttctcggagggatctcctgtcctgtaaaatatggtttcagcggagccattcctgaattgatcaggagaagactcttatcattatgcggtactaaagaaaagctcttcatcacaagatgtcccttgctctcaaagaactccaaaaacattttccttaattggtttactccgtatggctgcatacatcatcctcctcttttgctcaaaaagcctaacttaaaatatatcatagcagtccacttttgtaaagtggctcgactgaacaccttctgtgcataactcaactgaataccttctgtgcataatgtacggactgcatggcatcttttccataaaaatctgctccgatcatatcagcatattcctgattcagcacagctcctcctaccatcaccaggcaatccggggctttttcccgcaactggcggattgtctcttccatacttacaaccgtcgttgtcatcagggcactcaggccaactaaatggacatcctgctcaagaaccgtctcaactaccttttccggcggaacatcttttccgagatcgatcacatcaaaactgtaattttccagcaggacttttacgatattctttccgatatcgtggatatctcccttgactgtcgcaaggatgacctttccttttttctcctgtacttccccgctctgatccattctttctttgagtactgcaaatgcactctttgcagactctgcactcatcagaagctgtggaaggaatacagttcctttttcaaatccctcacctacattgttcagagccgggatcagttcttcattaatgatatccagtgcatctttctgctctgccagttctgccgtgatcgaactggcttcttctttcagtcctctctcgatcgcactctgcaatgtcatcgtatgctttccgcctgctgcctgtaccggagtcgttcccggctgctgtgcataccttgcaatatatttctcacagttactgtccagagccatcagggcatgaaatgcataccatgctttcatcatatcctctgaacccggattgatgattcccacgctcaatccattctgcattgccatggtatagaaaatggaattgacgatcggacggcttggaagtccgaatgaaatattagatactcccagtaccgtgcagactccaacttcatccctgagccttctcagtgtctccagcgtgatctttgcaccttccggttcagaactaatggtcattgccagtgcgtcaatgacgatatctttcttttcgatcccatactttgccgcttctgcaatgatcttctttgcaacctgcactcttccctcggcatctgccgggattccgttctcatccagtgcaagtccgatcacgactcctccgtatttctggatcagtggaaatactttgtccatagactcctgctttccgctgacagaattgaccatcgcctttccattataaatccttaacgcaccctccatcgcttccacatcaacggtatcaatctgaagcggaagacttgtaacgctctgaagttcctgcaccacttctttcatcagtgccggttcatcaatatccgggagtcccacattcacatccagaatatgtgccccgttatcctgctgggtaatcccctctcttaagatataatccaagtcatgctctttcagtgcctgcttaaaccgcttctttccggtcggattgatacgctcaccgatgatctttgatcccgtaccgagaaagacactctgtccataggacgataccatggtaaagttctttttttctaccggctttatcgggatcatacggcaggcatctgccatcgctttgatatgatccggcgtcgttccgcagcatccaccgatgacaacagctcccatttccacaattttcttcatgacttccgcgaactcttccggtgaaacatcataataagtctgcccgttcttctgcttcggaagtcctgcatttggctttacaataacaggcagggaagaatattttgtgatctgttccagaattggaatcatctgttctggtcccattccgcagttgatcccgaatgcgtccacccgcagtccttccagcaatgccactactgatggcacatccgcacctgtcagaagctttcctctttcatcaaagatcgtggtcgcaaaaacaggaagcgacgtattttcttttgctgcaagaaccgcagccttcagttcatacgtatcgctcatcgtctcgatatggatcaggtcagctcctgctttttctccatagatcatcacttctttataagcttcataagcagtctcaaaatccaaatctcccattggtttcaagagctttccggtcggaccgatatccagtgcagtatagattctccgtccatttcccgcctgttctgctgcagcctttacatggccgactgcagcattgacaatctcttccagagaatatgcatcatcatgaaactttaatgcgtttgcaccaaacgtattcgtcagtacaatgtcacttccagcttcaatatattttctgtggatctcacggatttcttccgcgtgcagcagattccatgtctccgggagttctcccggctgcagtccacgctcctgtaacagcgttcccattcctccgtcaaaatataataactcttttcccagccgttctcgtaacatctgtctttatccttcctgccttttctttgtatctgttcccggcttcgcctttcggctgccttcatatccttttacttttgttgccttacctgcggtatgcacagtccttttttccacaggcttcacagcctgagatcgggcatctttctttctctgtgctgatccctatgatcgcagtcacagacttcgtcggactcatcatatagctgtctgtcatcgtaagaccaatcttctttgcacaatccaacatcctcatgatcggctcctggaactcgatcgggaagtccccatatccagggctgaaccttggccgaagatacaatccacttttttccagctctgtgctgatctttttctgctgttcatcacaatactcttccagctctgcagcagcacatgcctggagtacaaccgcccttgccatatcggtaagagatacccggcggatcagcctgtccgccccggctcccagtgtcgccccaaacagaacaacctgtccgcatcctttgaggtttctcaacagacttttactctgtatttccattgtcccgacccgcaataagccatccacactatgatccaaatcaaaaatgcggtagacgaatctcggacttgcttccctgttcagatcgtcaaaagacgcttcgatcagttcataagtcctttcgtctgccgcatttcgtccgaaccccagatagcgaattgcctcacgtctctttttgtccatctcactcatctggtatttcactttcttaacacttaatgatttcagaaatattgctcatgatcttggttgcgacttccggtttgttcatagaataaatatggatattttttactccatttgccagaagatcaatgatctgatccgttgcataagcaattcccgcctgcatcattgcttccggtgaacttccgaaacggtcaagcaatgcaagaaatcttcttggaaatacagttcctgaaagctcctggcttctcttcatctgagccgcacttgtgatcggcataatccccgggagaaccgggactgtgatcccggcttccctgatcctgtaaaggaaattataatggatatcattgtcgaagaacatctgcgttgtaaggaaatcaacaccgcagtccactttctgttttaaaaagcggatatcatcttccttatgctcattctccacatgaccttccggatagcacgctgcaccgatacagaaatctccctgttttcggatctcctccaccagctcatatgcataatggaaacggtctccatccgggaacttcattccctccgggatgtctccacgcagagcaagaatattctctatgccaagctcctttaaattccggatcacctcacgcacttcttcttttgtggaagaagcacaggtcagatgtgcaagactgagtacgtgcagatcgtccttgatatgggatgcgatcttcgctgtattcttacttgtacctccacctgctccgtacgtcacactgatgtaagatggatccagctttgcgatctcatccgtcgcacgctgcacatttgcaaaccccgcatccgtcttcggtgggaacacctcaaaagatatatttattctgtcttcattcaatctgtcaatgatcttcatctggttgtaaactccttttattctcctatcaggctcttgtaaagctcttcatactgtcgtgcagaattctgccatgagaagtcctggctcattgcacgttctacaatcttattccagtctctctttttatcatagtaaatccgctctgcataacggactgtattcaacatctcatgtgcattataattcgtgaaactgaaacctgttcctgtcttttcaaactcattataaggctcaacagtatctttcagtcctcctgtctctctgacgatcggcagtgtaccataacgcagactcatcagctggctcagtccacatggttcaaataaagacggcatcagaaatgcatcacatcctgcatagaaccggtgggaaagatcatccgaatagaaaatattcgcagaaacctttcctgaatacttccatgcaaagtggcggaacatattctcatactttgggtctcccgtaccaagcactgcgatctgtaccgcatcctggcacatctcatccatcatataatcgatcaggtcaaatcccttctggtctgtcagacgggatacaattccgatcagcatcacatggctgtcctgatccagtcccagttcttcctgtaatgccatcttatttgccggcttgttccgcctgaaattgctaatattaaagttctttgcaagacggtagtctgtatccggattccagtcattataatccagtccgttgacaattccccacaggtcattggctctggcattcatcaggccttccagtccctcaccatagaaagaggtcttgatctcttctgcatagctgcggcttaccgttgtcactttatctgcgtaaacgataccgcctttcagaaggtttgcatccttatatgcctccattttatccggtgcaaaataataatccggcagccctgtaattttctgtactgcttttgtatcccataccccctggaacttcagattatgtatcgtcatgaccgtcttgatgcctctgtagtactctccaaggtatctgaaattgtccagataaaccggaatcagaccggtctgccagtcatgacagtggatcagctccggccggaacccgatcaccggaaggatactcagcactgcctttgagaagaatgcaaacttctcgatattccacttcggatcgccatcatacggtgcaaatcctgaaaaataatactcattatcaataaagtaaaatgtcacaccgtcgtgtaccagtctgaaaatccccacatactggctctgtccggcaatatccatgtaaaagtttgtaatatactccagcttttctttccattcctgcttcatgcacatatattttggaatgacaacccgtacatcatacttctccttatcaaaatccttcgggagcgatcccacaacatctgcaaggcctccggtcttaataaaaggaacacattctgaagaagcaaataaaatatttttcatattactatcctccgtttttcgcttacgccgcattttccgacgatgaattacaaatattataccgcattttttctgtaatgcaaagtattttccagtatttatcccctattttccatgcttatattccagttggatcgtatccgcgatcaatgcgataaattccgaatttgtaggttttccttttcctgtactgactgtataaccgaacagttcatccagtgtatctaattttccacggctccatgccacctcgatagcatgccggattgcccgttcgacccggcttgatgtcgtctgatattttttagcaacggtaggatagagaatcttcgtgatcgcattcaggacatccatgtcttccactgccatcatgatcgcatcccgcagataatgatatcctttgatatgtgccggaatcccgatctcatgcagcatattggtcactctgttctccagattttctcctcccggagtctgcccggtcaccagttcttccggtctgcgttctgttccgtgagtcatttttcttacgaatttgatccgttccaacaacattctgttattaaacggtttcataatatagtaatttgcacctttattaaaagcatcttctgtaatcttttcctgtcccaccgctgtaataacaataaaatatggacgtttactgacacttttatcctgattgatctgatccatgacagtcagtccgtccattttcggcataatcaggtcgagaagaaccacatcaggatttttttctttaatgatccgacacatctcctcaccatttttcgcctttccgaccagatccagttcctgatccgtcccgatcaccttttccagcagatctaagattttctgattatcgtcagcgatggcaacactcaaatgattcattctcttctccccttcaggtcatgagaacttcttttgaaaacgccactcgcttattatattcccctgcaccttgcagaatcaagcagattttgtagcagtaattcgacagcgttctcgacgattctcgtcatttcaactgttccagcattgtttccgcaaaaatgccgtaaccttttgtcgaatccatgacaaatacgtgcgtcaccgccccgatcagttttccgttctgaaggatcggactgccgctcatcccctgaatgattcctccggttttttcaagcagttcttcatccgtcacccggatcatcattcctttattgatctctgcagtttcctgatccaccttcatcacttcaatgtcaaattccctgacttcatcttccagaaaacacctcatctttgccggtcctgtcacgatttcctcttttgccgcagtttcaaccagttctttttttccaaaaagctcctcggttttatccagtctgccataaatccctgcatcggtatttttttcgatcgttccaagcagattatagcggttatagacgatcattccttccattgttcccggatttccactgcttccttttaccacattctgaatcgttgtcctgtaaagctttcctccggaaatttccatcagtccatttgtatctgtatcatgaatcccatgtcccaaagctccgaactcattctgttctgtcagaaatgtaaccgttccaagaccctgtacattatccctcacccagattcccagcttatattcaccggccgcggtctccactgcctgcagaacgatcttttccagttttccccctctccttactgtcagttccaccttctcaccggaaagcttttccagttctttcagcagttctttttttccacagatttctttctgattgactgctttgatatagtctccgcttttcaccattccctgtgccggttcgtacattttcccatcgattccttttatctgctgcgtatcaagaatcagtactccgtccgtttccatataaattcctgccggcatacctcccacagatacttttttcgtctgcactgctttcgtctgtgcctgggtttccctgctttccgggaaatattctgccgccgcacttccgacggaaaagcccagtcccacagccagaagaaaactgcacaccacagtcatccatctggaaagtttcttttttatcgtccggttttttaattttttatcccacataagatcacacctctttcgccaacaaaaaacggatacatcttctgtatccgcttttagtatgtgatcctgtcgtgcttttcacactgggattatctttcacactttgccaattctttcaattcttttgcactttccatgacacgttccgtcacatttgctccaccgagaagtcttgccagttcttccacggatgcagcttcatccagcatctcaacatctgtccgcaccgatgttccttctgctttttttctgatcaggaaatggtgatctgcagtagctgcgatctgcggcaggtgagtaatacagatgacctgtctgctctttccgatcagtcggagacgatctcccacttttcctgccgtaatgccggatattcctgtgtcgatctcatcaaagatcagtgtcggtgtatcttcttcatctgcaagtactgtcttcaccgccagcatcacacgcgaaatctcaccgccagatgccacacttcccaatggtttcaacggttctcccggattcactgaaagataaaattctgcctcatcctttccatttgaactgtatttttctgcctcagaaatccggatctcaaatctcgaatcaagaaaattcagttctttcatctgaccacagatctcttctgcgaactttttagccgaacgctgccgaacctgactcagcttttccgccatctttttcattgcgttaaaagcatcctgctgttcttgttccaggttctgcatgaatgtatcataatctgccagttcctgtagtctttgctttttttcatcacaatatgcaagaacagcttcaatagatcttccatattttgcctttaaatgatttaaaagattcagacgatcttctgtctcacggaattcttcctctgaaaactcaaaactttttgcatattccgataactcccggttaaaatcattcaacagtccatcaagctgtgtaagctgctcatacagtctgctcccctcttcatcaaaatctgctgcctcctgaaggcttcggattccacggctgatgagatcacttgcattcccggaagcggcctcccctgtataatggtatgtctcagctactgcttctgtcactttcctgctctctgtcattttccggtaaagttcttccagctcttcatcttctcccacaaccagtccggcttcttcaatctcctgtgcttcaaattcagcaagggagagttctctccttctggtttcctcatccatggtcaagctttcagtcctctttttcagttcattccatctgcggtacatttcagccatctttttctttaaaggaacgatcttttcttttccatacagatccagaagcgtcaggtgattttttttgtggagcagtgtctgattatctctttgtccatggatatcaatcagcatacttgcaacatctttcaatatcccggtattcacagtctctccgttgatcttgctgatactgcgaccttccatcagccgcctgctcagagtcagaaacccgtcttcaggatacaggttcatctcttccagatgcttttcgatctgttcatcttcgatcttaaaagtcagttccacaagtccgctctttgtcccgtttctgagcatatcaggactgtactttccgccaagagcaagatggactgaacccagcaggagagactttcctgctcctgtctctcctgtcagtatattcagtccctcaccaaactccacttccgtctcatcgatcaatgccagattttttacatacagattctgtaacatattcaacacctaatccttcttggacacaatctttctgatcttgtccatgactgtcactgtatcttctactgtacggattgcacacataatcgtatcatcgccggcaatgcagcccaccacttcattccatttcattgcatccaccgcaactgcaactgccattgccattcctgataccgtcttgatgacaagaatattctgtgccatatccattgacatatatccgtctcttagtacccggatatatttttcgctcattccatcttcatcctgacgatggatcacgtatttctgcttccctccgttgagtgacacttttgtcagcttcagatcccggatatctctcgataccgttgcctgagtcaccttgaagccggcattattaagatattctgccagttcctcctgcgtctcaatgtcgtattggctgataagttcaataatctttgcatgtcggcttactttcatttcttaatttcctttcattttttcacgcatcgtcttcatgaagctttctttgctcagtttaataagctttgccgtctcctccgctctcctgatacagacgcggtctcccgataccagctttctccggactgcaccgtcatagcacaaggctacttcctcctgcctgccgtatcttcccggacaaacttccacctcgatcacatcttctgccgaaagcactacactgcttgtattcaatgcatgggaacagatcggggtaatgacgataatacttgccgttggttctacaacaggacctcccgctgaaagattatatccggtacttccggtaggagttgaaatgatcaccccgtctgcaagataagtattcagaagcgttccgttgacatagacattaaactgtacgattctgatattcccttccctcgtcagtacaatatcattcaccgcaagatcctttttttcatctcctgccacgccctccagcatcatccgcagttcgatcgctgcatgttcttctccgcacagtctgtcgatggcatactgataatccttcaattctacttctgcaagatatcccaatgtcccgaggttgattccaagcagagggagttcctctccttccagatcccggattgcacggatcagcgttccgtcgcctccgagtaccagtccacattctgcgtcggacggcactgtccccggaaggatatgaccttcttcatccttttttgcaagtgtccatttttttcctttctgcatgatataattgcagattttctctgtaaccgcatagtctttatcttttaatatattcgttatgatataaaatgaatccatgctttatccccgcttattttgccaacgtatcgaatgcactgtccacgaccgtctccagattctgtgccagaatctttcccggaagttcctgcgtcttcttcagatgcaccagatattcaatatttccctccggtccttttatcggtgaaaattcaatctcaagaatatcaaatccgatagaagctgcataggaagtcactttttcgattacttcatggtgcgtacttttttctctcacaactcctttttttccgaccttttcacgccctgcttcaaactgtggtttaatcagagctacgatttctccgtcttctgtcagataatcccggatcggctctaacacttttgtcagcgaaatgaaggagacatcaatggaagaaaagtccaccggttctccgatatcttccggtgacacatagcggatattggtcttttccatgcagactacccttggatcctgacgcagtttccagtccaactgcccccgtccgacatcgattgcaaatacctttacagctccgttctgcagcatacagtccgtaaaaccaccggtagaagatcccacatccgtacagacttttccttctacactgacatcaaaatttttaattgctttctccagcttcagaccgcctctgctgacatacggtatgatatgccctctcacttcgatctttacgtcttccgggaacgtggttcctgccttatcttctctctgatcctctacgaatacatttccggacataatgatcgcttttgccttttccctggactctgcaagattcctttttacgagtaatacatctaaacgttctttcatttttaatcttcctttatcatcagataatctttttttatctgtgccacaatggtctcctgatccagtcccacttcttttcgcagaacttctacatttccgtgttccacataatcatcggaaattccgatcgtccgtacccgggtcttctcaccagtctgcatcacatactggacaacctgctcaccgaaaccacctgccagcacattttcctcgatcgtcacgatcagttcatgatccctgcaaagatcgcggatcagctctgtatccagtggctttgcgaatcttgcattgatcaggctgcagtgatatcctgcttcttttattgccttccatacagactctcccagtcctgacatatgtccgatgaaaaggatcgcaatcccactttcgcggctgatcacttcactttttccataaagaatcggagtacggaactctttcagcccctcataagcctctcctcttggataccgcaatgcaaccgggtacggaaaatcaacagcaaaacggaccatatctgccatttcccatcggttctttggtgacatgacagtcagattcggaatttccagaagaaatgacaggtcaaatactccctgatgcgtctctccgtcactccctacaagtcctgcacgatccactgctataaaaaccggcagattctgaagacagacatcatggatcgtctggtcaaaagctctttgcaggaaagaggaatataccgcaaagaccggtttcatcccgcctgctgccagtcctgccgcaaaggtcatcgcatgctcctctgcaataccgacatcaaaaaatctctgcgggaacatctttgcaaatcttgccagtcccgtcccgtctgccatcgccgcagtaattgctactactttttcatcctgctttccgatatctgcaagtacttttgaaaatacatctgtataagaatctgtcgcttttttccctaccgacattccgcttgggatgtcaaacggtcccgtcccatgaaatctggacgggttttcttcagccggtccatatccttttccctttttcgtcatcacatgaaccagcactgcatgatcaacccgcttcgcctcatttaagatccgtgtgagcttacggatatcatgtccgtctaccggacctaaataagtaatccccatatcttcaaagaacatccccggaacaaacaactgcttgatcccgctttttgtccttttcatatggcaaatgatccggtctccctttccggggatctttttcagcgtatcttccacacctttcttcagccccgtataagcctgtgccgtacgcagtccgttgagatactgggacattcctcccacattttcagaaatggacatattattatcattgaggacaatgataaaattacttttcagtctgctcgcattgttcagtgcctcgtatgccattcctcctgtcatagaaccatctccgatgatcgaaaccacactatggctgccgccctgaagttctcttgccgccacatatccaagtcctgcagaaatagaagtggaactatgccctgtatcaaaggcatcacattcgctctcttttctttttgggaatccactcatccccccgtattttctcagttcatcaaatcccgcttttcttcccgtcagtaacttatgcgtgtacgcctgatgtcctacgtcccagatcagcttatcctgtggaagatcaaagacaagatgaagtgccatcgtcagttccacaacacccagattcgatgccaggtgacctccggtcacactgatcttctcgatcagaaactgtcggatctcatctgcaagcatagtaagttcctcgggactgagattttttatatcattttccttatggatcttctcaagtaccatcaggattcctccttttatttttccctgtataccagagattttagtaattcttcaaggaaatcatccttcgccgggaacttccgcagcagatccaccgcctcctgcgtcaaccgttccacatcctcatgtgccttttcaatccctttccaggtcacatacgtcgttttttcgttcttttcatcactgtgaaccggctttccaagcagttccgtcgtactggtcacatccagaatgtcatcctggatctggaatgccagcccgatctttcctgcgatctgctccatcctgctgacctgcccttcctctgcacctgcaagaactgcacctgccatcatagaagcctcgatcaatgcactggtcttcagcctgtaaataaagtccagtacttcgcctgatacagcttttcctgattcctgcacatccacgacctgtccaccgatcattccgtaaattcctgccttatccgcaaggatcttcaatgcttttccaatccttaaagcatgctccgactcctcttcaaaagcccggcaggcagtctcaaatgcataattaagcaacgcgtctcctgcaaggattcccatatcttcaccgtatacaatatgcgttgtctttcttccgcgtctgtattcatcattatccattgccggcagatcatcatgcaccagggaatacgtgtggatcatctcaatggcagccataaacggttcgattgcagctccttctccgccaaacagtctgtaactctcccacatcagcatgggacggagacgctttccacctgccatcagactatactccatggcctccatgatcgtcctctgatatccttttttttcaggaagatactttttcaggatcttttctattttttctactctgtccgtatactcttctttaaaattcatgcttttctccattctcatccagtacaagaatcttcttttccacttcattgatcgtctggttgcatctccggatcagcttcattccctgatcgtacaacccaaacgcctcctccagtgaaacatcctctccttccaaagtaccgattacctgatccagccggtcaaacatttcttccaaattttcctttttctctgtccccatcttatgtctcctctttctcaacgccggtcacttctgcccggatccgtccatccgtcacatagaccgtgatctgttctccctgctttacattactgactgtcctgacatttgcccccgaactgttctccacataagcatatccctgactgagcttttcaagaggagataatcctttcagtcgttctgccataagtcccagacggtatttttcctgctccagtctccgcatcatttctcttctcagccggttctcagcatctgcggcgaactgtcgctgctcatttaaccgctgctgcggatgatacgcccgcatcctgagcgaatactgctccagtttctgtctcttccgttccagtattaactgcataaaatgcagcaacttctcttcccgcagcttcagattctttttcatctccatgaaatcatacaccgccagttctgcggcagcagaaggagtcggtgcccgcagatccgccacaaaatcaataatcgttgtatcggtctcatgtcctaccgctgaaatcaccggaacagaacagtcaaatactgcccttgcgactgcctcttcattaaatgcccagagatcttccatgcttcctccgccacggcccacgatcatgacatccaccttttctgcttccagcgcatggattccctttacaatactctcagcagcaccttcgccctgtaccagtgccggatacaggatgatctgcacaaaaggattcctccgcttcgtaatattgatgatgtctctgactgccgccccggtcggtgcagtcacaaccccaagccgccggatatactttgggatcttctgcttgtactccggtgcaaacattcccatttcctgcagttctttcttcaaaagttcaaagcgttcatacagaagtcctacaccgtcccgcacgatttttcttgcatacaactggtattttccatctcttgcatagacatccaccacaccgagtacaatgatctgctgaccttcctccatacgaaaagaaagccctgaccttgagcctgcgaacatgacgcaggcaatcgtgccggactcgtctttcaatgaaaaatatatatgccctgatgtatggtatttcagattcgatacctcaccctttacatagatccggttcagcatgaaatcctgggcgaacatattcttaatataagaattgacctgtctcaccgtatagacattcttcatcctgatatctccgttctgcatatactgacttacttcgtctcatccccgtctgcagagcgtgcgatctttccaagtaccccgttgataaaggacggactgtctccaccgctgaatctcttcgccagctctactgcctcattgatggcaactccgaccggtacttcctcgtcccacttcatctcatagacagcaagtcttaaaatggcaagatctaccttgttcatccgggtagtcttccatccttttgcatactggttgatcagttcatcaatctctgcaatatgccctgcaaccgcctcatatttttcctggatataatctttatctttatctgccgcattctcaagcgtcatgaaatagtatttcagatgctcctgcatatcctcttcctggttaaattcttcctgaaataacagcttgaaaatatgctcgcgaagttctgttctaatcatattgattcctttcctttgtaaacctactcctgattctccatctctacgccggccactttgatattcacgtctgcaacttcaagtcctgtcatgttctcgatcgcattcttaaccttttcctgcacttttcctgatacttctactacactgtagttatacttcagattcagggtcagggaaacggtaaccacgccttccagcacatctactttaactcccttggaaagattcttcatcccgagtctgctgatcagctcattcgtgatattgcccgccatggaggctacgccttccacttctgtagctgccagggctgcaatgatcgcaacaacttcatctgcaatctttacttctccctttcctgcgtcattctgtatcgtataaatatttctttcgtcctttgccatgttcaaaacctcctgcattgtctgattctttttccattataacaaatatcgttccgtttgcaaagaggaattatgaccgcccgaactctgacaggatcagtcctttgtttctttcctctgtcatacggatactccattcatgtgcaaaaagcagcaatggacggtccttcagatccttgatcttcttcatatctgaagttccgcttaagtgatccatatccacatcttcgttttcaatccagcggatatactcgtatggcagattctccagccggatctccacattatactcgttgttcagacggtatttcagcacatcaaactgaagcacaccgacaactccgacaatgatttcttccattccggtattatattcctgaaagatttggatcgcaccctcctgtgcgatctggttgattcccttgacaaactgctttcttttcatcgtatcgacctgacgcacacgtgcgaaatgctccggtgcaaatgtcgggattccctcataagcgaatttttcctttgaagtcgtaagggtatctccgatcgaaaagattcccggatcaaaaaccccgatgatatctccaccataagctttggtgatcatcttccgttcactcgccatcatctgctgcggctgggaaagacggatctcttttcctccctgcacatggtagacattcattcctgcctcaaactcaccggaacagatccgcataaatgcgatcctgtcacgatgtgccttattcatattcgcctgaatcttaaatacaaaagctgaaaaatccttttcttccatcggatctatctcccctttatccgacatacgcggcagcggagatgtggtcatcttcaggaaatgcttcaggaatgtctctactccgaaatttgtcagtgctgaaccgaaaaataccggagaaagctgccccttatctaccagctcctggtcaaattccgcagaagctccgtccagaagttcgatctcatccgccagaattttctttgcatctgcaccgatcagtttctctgtctcaggtgcatcaatcggaaccatctgaacttctcccatggccgttcccttttttgtatctgagaaaagttctacttctttctttgcccggtcataaacgcctttaaaggcctttcccgaaccgattggccagttcacaggacaggtggcgatccccagttctttttcgatatcatccagcagctcaaacgtatctcttgcttcacgatccattttgttaatgaaggtaaagatcgggatatgacgcatcacacataccttgaacaattttctcgtctgtgcctccacacccttggatgcatcgatcaccattaccgcagaatctgccgccatcagggtacggtacgtgtcctccgagaagtcctgatgtcccggtgtatccaggatattgatacaatatccgccgtaattaaactgcagtaccgaagaggtgaccgaaatacctctttccttttcaatctccatccagtccgatactgcatgctttgccgttgcttttcctttgacagaacctgcctgattgatcgctcctccataaagcagaaatttctccgtcagtgtcgtctttcctgcatccgggtgtgatatgatcgcaaaggttcttctcttttttatttcattcgtaatatctgacatatgcttatctcctatcgtccaggcccccgccggtcggttcttccgtatccgtacgggtggcatccagtagctagtgtatcacaagtacagccatacggcaaatagttttccccgaaattactccggtgatcccttcgtacccattcattcatgaatcggtgtgatcacaatcccttctggtgatacttccgtctttcttgtaaggatttcttcaatctttgccctgttggcatctgtcagttcttctgcctttaccacaacatcaacagaatcatccccgatgctgaccaccgcctcggaaaagccttttgctgccatcagcgattctatgtctgcttccagctctgccctttttgtcagtgccaccatctgatcgactgcatcctgcttctgctcatcgctgagatttttattatcaatgattgactgcaatgtttctttactttgtgccataacctgttctctggacacttttgcctgtgccacagtagcctcagcggttgtattggtcagtactgcttctcccggagttccttctgtctcagaatcattacttaaaatatcctctgatccggtcgccatatcttcttcagaaatatccagaagttcctggtttgtcagatccgcactggtctgcgtcgtgtcgtctttttcagttccaaacagccttcctgtataattcagatagccggctgccgcaatcatcaccgccagtgctgcaatcatcacctgattcttttttaatacccgcttcactatgctcctccttttattctgtgcctgccacattgcgtttcattacttttattttatgtgcttccaccccatataatgcctgaatcgcaccggttatattctgcaccacgaccgcgttgccacccccatctgcgatcacgatcactccttctacttccggggagagttttttgctcacatagggaacctgcgttccatcggatttctgttcataaatgctcgttttatcagaggaagtttcttttgtcgtccgctttccgccctgactgtcctcttcttccacagactgcccgtcactctgctgatctttttcgaccacattttcttccgaagacttcagcgtgatcatcacttttacattccccaccccctccacacactgcagggcttcttctgtcttttgttcaagataccgctcatatgatccacggttttctgtggttgtctctgttccggtctccgcatcttccgaatctgattttttcggaaatggcagcacgatcaccagcaacagcagtccggtcagaaatagaagcagcagttttttccgagccggcagttcttccttgttctctttttttccgatcttctcctttaacctggcaagccactcgttattcaatgcgaatttcctccacttctacagcctgggtttccgatacttttttctggcttttttcgtctgctccttcctctgatgtctgatattcctcaggcagaatttctgtcagatctgccgattcatataatttttgtaataattctttttctgcctgatcttcttttgccagatttccctcataaagttttgtgatcatcccgtctgttcccgtcagtttcagcatcggttcaaggaaaagcagtaacagaaccattcccgaaaaaaagcgtacatattttccataatcttttcctggaactaaatgcaggattaccgcactcaggaccagccatacagaaagattctgaatccactgataaaccgttcccattcatcttccctcctttcaggaagtcgctcctgcgatcaccgccagtgtgatcaggaaaaaaagtgccgtgtaaaggagaatctgcagcagcagtccatatccttcactcaccccgccaatacacgctgtaatccttttatccgacactggctgaaccattgctgctacaaatttatatataaaagcaagcagcaccagccggatcacaggaactgcacagaccataactgcgatcaccattcctgctgccccgatcccgtttttgatcagcaccgcactcccaagtgctacctctgccactcctcccgtcacatcaccgatccacgggatcgcttctactgtccggtttactgcacttcgcttcacagtatcaatggcaggtgcaagaagtccctgaagcacattgatcccgaccacacctgccagcaatgtcttcagacaccaggcaattccttttctgatcagatccgcaaattctgacagcagatcctctcccgtcagattggaaagaacctgtatcataacaaatacatgcacaatcggcatcagaagttccaggatcaccagctctactaaatagatgatccacagtacaatattataaaataccagagccgaggaactgcctgcagcaaatgcaactgcaagaaagtaactgggacataacagcttcataaattcggtcagataagaaagcagttgttctgtatcctgcaacgtatgctgaaaagttacaagtgacagggtcataagcagcatataaagaatatagaagctgacttccgatacctgccggttctgaaagacgcttgtaaaattgttgaacagggcagcagctactgcgatcaggatcatatacaccagtatttttttattcgtgccgaactggtaaaaaactgtttcttttataaactgcaccactgtaccagctgtggatcctccgttttccgagatcagttgcataagtatttcccgaaaagaaagcttttcatccggaaaaagagttttcatttcctgatccagttttgaaaaatcaaattcttcaaataatgcctcctgcacccggtctgcctctttttctgtattttccgcagcataaatgaccttgctcccgaacagaaaaattaaaatggcaaggaatacgggaaaaagcatcctgatcccccgcctcatcccaagaaccccgtcatgacttccaacagagtctgaaggatcggaagtcccatcgccaaaatcgtcagcttactgaatatctcaatctgggatgcgatgctctgatatcctgcatctttgcagatgcctgaagaaaattctgcaagataagtgatcccgatcatttttatcatagttccgaaaaaacgctgatccaccttaatataattcccgatcctgccaagtgaatccaccgcatctctgagcctttccagcatacagccaaataagagcaggctcacagcaacactgatatagacggcatattctgattttccacttttaaactgcactgcaaaaaggactcccagtactccgatcactcccacctgcaacatactcattttctcccctctcacaacatgaacaactgccggatcgactgaaacagatcgtaaatatatggaagcacccacgataagaccaggatcagtcctgcaagactggtcagaaatgcctgttcatctctcccgctgtgctttaagacctggctcaggatcgacacaaggattcccactgccgctatcttaaaaatcagattgatattcatatcccctcccctgttctaccacagcagaatgatcaggaacagcccgctcattacgcccagccagttgccgatctttctttttcctgccagttctcctctctgctgcctgatcatcagatccatctgcttcatggaaagttcaatggaccttcccatggtctcacggtctccctgtcctaaaaatgctccaaaatctctgatccattcccggtgctctttcttcagtccggcagctccaagatccttttccacgcatcctttccatatttctgtgaaatcagcgtctgttcttttcgcagtccgtcgtgcggtatgttccagccagcttttatatggctcttttattttcgctgatacatccatcagaagttcctgcaacggtgccccggtatattccagttgtccccggatcatcccggcaatatatcgcagatattccatctgcctgagataatctttcagtccttccccataaagatagcctgctcctgcagttgccgtcagcactaaaatgctccctataagtttctgcacaacacgctcccccgttcatcataaattcccaggatctcaccgggtcctttttcatttccaagcaccacgtatctctggaacatcctcctgcggatcaggtctcccagtaccggcttgttggatgcttcatccatgttcagtccatggacgcttgcgatcatccggcagccacactgcatggcatattcaatggcatggatatcctctaccgttccgatctcatccactgcgatcacctgtggtgacatggaacggatcagcataatcatcccttcggccttcgggcagcagtccaacacatccgttcttgttcccaggtgattctgtgcaatcccgagataacatcctcccagttctgaccgttcatccacaacccccaccgaacagcccttcacatattcatttccgtcagaaatctgtcggatcagatcccggatcaacgtcgttttgccgcagcatggaggtgaaatgatcagtgtatgacacacctgcttattcgccacgatataagggatcagccgatccgcacatccaagtacttcatgcgaaaccctgatatttaatgatgatatgtattgtatatttttcaccctttctttttccataattacttttcctgccacgcctacccgatgacctccttccactgtaacaaatccctgtctcaattcattttcatatgcatagagagaataatggctgatatagtccattgtctctcttaattcctcttttgttacaatgtacggttctgttcctgatcttaatactatctcttcttttccccgtacaacccgcagcggctgtccaagtctcatccgtatttcctgcaattcttccggctttgggactgtatttaaaagtacttttctgatcccggctgcaagaatgttcagtatttgttctcttctttcctgtcgttccatcttgtccacccctttaaacaatatatgtgcaggttgtggaaatatgcagcaacgtactggctcttttaagaaaaatcttcttaaaaataaaaaagctaccagatttttctctgatagctttctctttatttcaataccaattcttcattcagtactctttattctgccacatctttcatactgaagctgaatcttcccattttatcttttccaaggcatacgactttcacaacatcgccaaggcttacaacatcctcaaccttttcaactctgttcttggaaagctttgaaatatggaccatgccttccttacccggtgcaaattccacgaatgctccaaattctttaatgctgacaacctttccctcaaaaagctgtcctgcctcgtaatctgttacgatcgtatggatatattttgcagccttctccatattttctttctctgtaccacagatggatacatttccgtcatcatcaatatcaatctttacaccggtctcttcgatgattgcattgatcgtctttccacgctgtcctacaacatctccgatcttctgcggatcgatctgcatctggatgatcttcggagcaaactctccaacttctgccctaggctctgcgattgctttgctcatcacttcatccatgatataagttcttgctttcttcgtcgctgcgattgcttcttcaatgatcggtcttgtcagtccgtggatcttgatatccatctggatcgcagtaatacccttatgagtacctgcaaccttaaagtccatatcgccaaagaaatcttccagtccctgaatatctgtcagaaccagataatcatcatccgtctcgcctgttacgagtcctgcagaaatacccgctacagcagacttgatcggcacacctgctgacatcagtgacatactggatgcacatacactggcctgggaagtagaaccattggattcaaacgtctcagatacagtacgaatcgcatacgggaattcagcctcactcggaagtaccgggagcaatgctctctcagccaacgctccatgtccgatctcacgacgtcccggtcctctggaaggtcttgtctcgccaacagagtaagacgggaaattataatgatgcatatatctctttgttgtctctgtctcatccagtccgtccagtctctgtgcctcagaaagcggtgcaagcgttgtaacagtacagatctgtgtctgtcctctcgtaaacattgctgaaccatgaactctcggaatcaggtcaacctctgctgccagcggtctgatctgatcgatggcacgtccatccggacgcttatggtctttcaggatcatttttcttacggtctttttctggtactgatatacagcttcacccagctttgcaagccattcttcattgtcggcaaatgcctcttccagcttctcagtaatgacacggatattttcttctcttgtctgcttgtcgtctgtaaatacagcttcttccatctctgccggagtaacgatttcctggatggcatcaaataattcctgcggaactgcgaaactctgatactcgtgctttttctttccgcactctgcaacgatcgtatcaaagaaagcaatcaccttctggttcagttcatgtgctgcaaagattgcctcgatcatcttatcttcaggaacttcctttgctcctgcttcgatcatgattactttctcttttgtagatgcaacggtcagtgcaagatccgatacaaccttctgtgcggctgtcgggttaaatacaaactctccatctaccagtcctacctgtgtcgtagagatcggaccgtcaaatggaatatcggaaatacttgttgccagtgcggctccgagcattgctgtcagttccgggctgcaatcctgatcaactgccataacgagattttccagtgttacatcatttctgtaatccttcgggaacagcggacgcatcggacggtcaataacacggtctgtcaggatcgcattctctgatgcctttccctcacgcttattgaagcctcccgggatctttcctacagaatacattctctcattgtattctacactgagcgggaagaaatcaattccgtctctcggtttatcagaagctgtcgctgtacataatacagttgtatcaccatagtgcatcagaactgcaccgttcgcctgctttgccacgcggtcaacatccacacgcagtgttctgccggcaagttccatttcaaactttttaaacatataccttctcctttgatcttatttcatttcactttctctgtggtcagtctctcctccgaaactactgaaaaacccatcatccgcttccggatcatacgcttttcagtggtctcggtcagtatccctgtccacaatcttttttattatatcataccgttgttccattagcaaattatttcttttacaatcaatctacagaaaaatgggactgtcgctttaacgatttttaaatcgtgaagcggcagcttccttttttctgattttctctatataattgctctgtttctattgaaatgatagctttttcgtaaaaaagccgtactttaatacaatccaaaactggatttgaaaaactttttggattttctaaatttat

SEQ ID NO: 37 - DNA, 124076 bp, Mediterraneibacter lactaris
  misc_feature (714)..(714): n is a, c, g, or t
  misc_feature (1119)..(1119): n is a, c, g, or t
  misc_feature (1706)..(1706): n is a, c, g, or t
ctttggatatttttcatcaagtttctttagaaaagtcacaaagtcagaacttttatgagtttcacttactaatggaattgcttctcctgagagcaaatcaatcgctgcaagcagggagagggttcccagcctgacatactcataatctcgctgatagccattgcttttatctgtattcggaatcggtggacggtcttcacctgtggtagcaattgcctgaattcctggcttttcatcataagacagggtatgtacggcatctttctcaaagggaatcagttttccatccttgtcaaactgcatttcaatttgcttgtagataacaaggacatcatgcatttttgcatcaaactcaggatcccgtctttcgcagtaataggacacctgaaacggtttgatccttgcattgctcagaattttccgaagcgttgtttcagctactgttgccatacgaggatgtccttccgtttctgctatagagttgatgaatttcctgaaactcatgggataccagaattcagcagaatagccgtaatccttcggtttttggcaggctttactgattacccaggtgatatcgtcatcggtaatttccgctttccttccacggcctttgttatcacgtaaagaagcttcaacaccgttctctttaaatttgttaagacaacgttttaccacactgattccaatatccagtttgtcagcaattgcttnaatccttcggtttttggcaggctttactgattacccaggtgatatcgtcatcggtaatttccgctttccttccacggcctttgttatcacgtaaagaagcttcaacaccgttctctttaaatttgttaagacaacgttttaccacactgattccaatatccagtttgtcagcaattgctttgttagatgcaccctcagatttgagcagaaggatcctagcacgttgataaacgcgaatttccaaagtgctctgagtcagcagtttatttaagtaagatttatcatcatctgttaaagaaatagttttaattgtattaggcataattggcacctccgatggttcaattataccataataggaatgtgaattaaaatagtttgttatttaaagtggattatactagntgagtcagcagtttatttaagtaagatttatcatcatctgttaaagaaatagttttaattgtattaggcataattggcacctccgatggttcaattataccataataggaatgtgaattaaaatagtttgttatttaaagtggattatactagatgccagggtcaaaaggtctaagcccacatgagcttgctcataggtgggtgaaagaccttaggacccgccccgatatgagcataaaagtgggatgataatcccacgatatgcgaatattcggtaggattgtgggagtgcgtagcacggagcaatccgtaggcatcaaagtcgggggcttttgaccccgacatctttactattggacagatcatttatcttagttgatagccatccggctctttatttcttattggaatttcgtctttgttggaagaaaatgttctggcatgagggaaaattttctgatttgaaaagcctaatatccgcccttgctgttgcgtgagcagtgcattgacaaggagcgttccgaagacactttgcccaacttgttaaggaacgtaaacaggagtgcctctgcacgagtgtttccacnggagcgttccgaagacactttgcccaacttgttaaggaacgtaaacaggagtgcctctgcacgagtgtttccacgttcctgttacaagttgtcaacgggctgaggtaaagcgggtcctgcactgcgatgcaacaaacaagtgtggatatggacgctcttctgtcagaaacacttcctgctgtcgcgatattttcaccccaacaactacaaatttcacaacatctccagctcccgaaatacttttgccaattcttccggcatggactgtgccagtgcatgtgcaagattttccggactttctttcatctctcccaaaacccattgtaccgtcatataaattgacccctgacaatacatttctaattgaaattgcagatgctccgacatggtttttcctgatttttcttcaatctgatttttataaaattccctgatcagttcaaaatcatgatctctcagacagttctgagtatcatttttaaatgctgctttgaaaaacagcttttcttcctgtatgtaatggaatttatttaccagtgcctcatacacggtctttccttctcccatgtgggcaaatgattctatcaaaatcttatcaaaataccagttgatcagatcatatttatcctgaaaatttctgtaaaatgtctgccgtgtcacaccacactcttccgtgatctccttaactgtgattttctccaccggtgcttttttcatgcaggatttcatggcatctgcaagtctgtattttactttttcgcccgatttatgccattcttccgaatgccgcacttctttcaattcatttttagccacttcatttttaagcatttttcccatgacctcacctcctgttgtccactggtctgcatccaagcaattctttcagctctgtatgcggattttttgtatttttctgataaatatccacgcagtttaatgctgctcccccatccaaaaatgcaggaaaaaggaatccacattctggctctccaggttcatattcattttctaacggacaaatcacacagatcagatattcatacacattttctgattctcccagcctttcatgatcttttccctttgcaggaatatcatatctgtcatgaaatacatagattgcataagaactgtccgtctgatatttttctccaatcacttcataaaaagtatccatcaatgcatcatttttgaggccacagtttctcatccctatcagaagctgccgcataggattcactgtcgcttttccattctgatctttttcagattcaaaacagtattctttcagatttttattggtttcagaaaaaggaactgcttttgccagtgcaagattcttctccctttctgccggactcagattctgaaaatgagtattaaatgttccttcactaaatccttcttcatccatataacttcctgcaattctggtaatggatgttctttttactgtcattcgccttgtcaatgccagcatatcttctctgttgatcatattctacaattccttattttctaaatgatattttttcttctcagtatacatgatattatctgcctcttttaacatggtaactatgtcattttcattctctctccataaaacaccaatagaaaagttctcttttcttttttccatttccctgcgaagctcatctaatttttgaaaaaactgtgccttaacaatccccgtctcaataattacaaattcgtctccaccaacccggaatgcatttcccgggaaaatattctccattgcagttgctgcctttcttttctttctatactattaataataaaagatgtcaggggcaaaaggtctaagcccacatgagcttgcacactggtggtagaatgaccttgagacccgccccgatatgagcataaaagtggggcgtaagcaccatgatatgcgaatagcgggtaggattgtgggggtgcgtagcacgaaacaatccgttggcatcattgttgggggcttttgaccccaacatctttttattatagcatgtattttactgagttgtcatgatgttactaatagatctatatcttttccgcttctttctcatcatgtattttactccatattataactgtatcgcaatgcaattcattctttttaatgtgtaatgcaaactactgtggaggtgaattacaatgcaggacataaaacaaaatcttgccgatgcagtgcgagaagctcgcacaaaactcggactatcacaggaacaatgtcccttgtaatctgctaggtggtctatattgaatttttcataaaccgcttccagcgtttccccctgtgtctgtccctgcaactcggataattctcccacatagttatgatttcctttcttctaaacgcaaaaataccgctctgtaaattcacaagacggtatctgaaaactaaaaaaggtgtatggattttaatattttccatacacctgtctctatgttactttaaaatttttaataactgaatcaactcatgtggttcatgactggctgattccgataatctgctgtcaaactgctgaaaacctttcccttgataaaaagacagcaatttttcttcatttaatgtttcgagaaaaactaccataccaccagctaaatactgtaactgctgtaactgcttaattgccagtccaagcaattcctccccggtaattcggtcatttgcaccattgttatagtttttgccaagctgtgctatcaagtaagctgccatattatatgtatgattctgctcattcagctcacttactctggctagttttttctttattgtattactaaatgactctgcatttaccgttattggctttatggtaattgcaaaatatcccacaagttccgcatcttctgttgaaaacaccagataggtgacggattgctgctttttggcaaattctattgactgttcttttgcaaatctttcaacatccggatttttctcacatgaaaactcggaaagaacctgtcgtaaatcgtcctctccgagttcttcattgtttccattcaaatactcacgaatgttgaaaaccgtgtatttacttacttcctgcattcgctttcttccttttttgcataaatttcgctatatctttcggatctgttaaaaaagtagcattaactttaatggaaggtgtctgatcgttggcagatgcttcaatcgcatcagcaaacatctcaacctgcctttgacctgatataacaaaattcttagtaatacttgaagttgccatataaacacctccttcattagtatggcttatcttcgcttaatcatacttttctatttttattgtattcggtaactgcaaaatttgcaataacatagttgtgaatttttttaaaatcagcgaacctcctctttctcctttactttttcatgcttatccattccggctactttctgcttcatattttccagcctttcctttaatgacacccttgtcactggcttatccgtaacactctcctttgtcatgtagttatgttatgaaatgtcaacgatgaaatattatcttgatttttaatcagttcctcttttctctattgttttcgtataataatattgtagcctattactaccaataatggactatgactctacatacaacagaaaaaagaggtgatataaatggatattctcaatattaattggaaaccgaataacacattggaaatcttactttcaactggttctgttattacctttacagatgtttctttttccaaccacttaattttgtctaataatcccacattactcgacaaaattatactttctaagaagcatactctctaagaaggcattaagaaattcatttactaagtaacaaggtaagtaattacaaatttttctaaaacaaaaaagactcctgaaaccttagattatttctctaaagttccaagagtcttagtttatgcttggacatttaacttgattaaatactcaagttaatttcacatcacaggacggttctttttatctgtactctggtacaatttgggggctgattttctagtcagttagctatgtgtttagctgtgtgtactggatagaagttttgccctaaaactggataattgggtttgccctgtgatattaccaacagtttatttcttctggttgatagctgcctgtgctgctgcaagacgagcgatcggtacacggaatggtgagcaggatacatagtcaagtccaatgctgttgcagaactctacagagcttggatctccaccatgctctccacagataccaacgtggagtgtcgggttaaccggttttccgagttcgatagccatcttcatgagcttaccaacaccaacctgatccagtttagcgaatggatcgttctcgaagatcttagcgtcatagtaagcatcaaggaacttaccagcgtcatcacgggagaatccgtatgtcatctgtgtaaggtcgtttgttccgaagcagaagaagtcagcttcttttgcgatatcgtcagctgtaagagcagctcttgggatctcgatcattgtaccaacctcgtactcaaggtcgcttccagctgctgcgatctcagcgtcagctgtctctacaacgaatttcttaacgtatttaagctctttgatatctccaacaagtgggatcatgatctctggtttaacgttccaatctggatgagctttctttacattgattgctgcacggataacagcacttgtctgcatcttagcaatctctggatatgtaactgcaagacggcatccacggtgtcccatcattgggttgaactcgtgcaggctgtcgataatagctttgatctggtcaactgtcttgccctgagcgtcagccagtttcttgatgtcctcttcctctgtaggaacgaactcatgaagcggtgggtcaaggaaacgaattgtaaccgggttaccttcaagagcttcatacagtttctcgaagtctccctgctgctccggaaggatcttagcaagtgctgcttctctttcttccactgtctctgcacagatcatctcacggaatgcgtcgattctgttgccttcaaagaacatatgctctgtacggcaaagtccgataccttctgcaccaagctcacgagctttcttagcgtcagccggtgtatcagcatttgtacgaaccttcatagttctgtacttgtcagcccatcccatgattcttccgaactcaccagcgattgtagcgtctacagtcgggatgattccgtcatagatagcacctgtggatccatcaagtgagattgaatctccctcgtggaattcttttcctgcaagtgtaaatttcttattagcttcgtccattgtgatgtcaccacaaccagatacacagcatgtacccattccacgtgcaactacggctgcatgggatgtcataccaccacgaactgtcaggataccctgagctgacttcatacctgtgatatcttctggtgatgtctcaagacgaacaaggataactttctctcctcttgcagcccactctacagcgtcatcagctgtgaatacgactttaccacaagcagctcctggagatgctccaagtgctttagccattggtgtagcagctttcagtgctgcagcatcgaactgtgggtgaagcagagtatcgaggttacgagggtcgatcattgcaacagcctcttcctctgttctcattccttcatctacaagatcacaagcgatcttaagagcagcctgagctgttctcttaccattacgtgtctgaagcatatacagtttaccatgctctacagtaaactccatatcctgcatatctctgtagtgcttctccaaagtattgcatacttctttaaactgcttgaatgcttccgggaacttctgctccatctcggaaatgtgcattggtgtacgaacaccggcaacaacgtcctcgccctgtgcatttgtcaggaactctccgaacagaccgttctctcctgtagcagggtcacgagtgaaggcaacacctgtaccacagtcatctcccatgttaccgaatgccatcatctgtacgttaactgctgttccccatgaatacgggatatcattatcacgacggtaaacgttagctctcgggttgtcccatgaacggaatacagccttaacagcctccatcaactgctctttcggatctgaagggaagtctgaaccgatcttggacttgtactctgccttgaactgctcagccagcttcttcaggtcatcagcgtcaagatcaacgtcctgcttaacacctttttcttctttcatcttgtcgataagttcttcaaaatacttcttaccaacttccataactacatcagagaacatctggataaatcttctgtagcagtcccaagcccaacgtgggttgcctgaagcttctgccagtgtctcaacaacttcttcattcagtccaaggttcaggatcgtatccatcatacctggcatggaagctcttgctccagaacgaacggaaacgagaagcggattctgcttgtctccgaatttctttcctgtgatgccttccattttatcgatagcttccatgatctgacccataatttcgtcgttgatctgtctgccatcctcatagtactgtgtacaagcctcagttgttactgtgaatccctgtggtaccgggagtcccaggtttgtcatctctgcaaggtttgcgccttttccaccgagaagatttctcatgtcggcgttaccttcagtgaacatataaacccattttgccatgttcaatgacctcctaaaataattttttacaaataaatttacattaattcgcatataatattttaatagttttacatggttgagtcaagcgttttgttcgtaattatgtacaatctttacaatgcttttttgttcatttatgcctcattcagattcgttactgcacaccatgtcgaatattatagcttttctgtctgatctgtcctttatttatgctgtcagggtcaaaaggtctgaaaccacgtgtgcttgcacactggtggtagaatgaccctgagacccaccccgatatgagcataaaagtggggcgtaagcgccatgatatgcgaatagcgggtaggattgcgggagtgcgtagcacgaaacaatccgttggcatcattgttgggggcttttgaccccaacatcttatttatttatcatcggcatatccttttctgctttgtctgtccccggctcatttatactgctccgtccctcctccagtttcacacagggaagattccaacggtaatgtgcagctgcaagccggatcagcaacgtcactgctgttccggtgatcagggacggaatctgcccataccgacggtaaaccagtacactgcagaccgccccggcaatcgatgcacaggcatagacatgctttacgaaaatatagggtggaacccctgccatcatatcccgcagcagaccacctccaacaccggtcagcgttccgaggaagcagagaaaaaacatatttttttcatatcctgctcccacacccgttgaaccccccattgccgtgaaaatccccagtcccagtgaatccatcagaaaaataatctttgtatacactatctggtatctgctgtggagcagctttttattcacatacagcaatacaaacggaatgaccgcagacaccactgccgcctctacataaaccggtttagtaaaggctcccggtatctgtccgaggaacacatcccgcatcattccgccaccgactgctgttacaactccaagcacgatcactccgaaaatatccatctgcttccgcattccgaccatagctcccgaaactgaaaatgccaccgttccaatcagctctatgatcagtacgatccatgtctgtagttccataatacctccggcactattctgctttacatttcttcaatgaatgccctgtatcctttatatgcctcatatacatcggctttgctcgtcacttcccatggagcatgcatgctcagcacggcaactccgctgtcaatgacttccattccgtaatttgccatgatataggcgatcgttcctccaccgcccgcatctacttttccaagttctgcaaactgatatgccaccgcctgtgcatccattgcatttctgatctttgcaagatactctgcatttgcatcattcgatccgctctttccacgtgatcctgtaaatttattaaatacaagaccttttccgaagaatgccgcactacgcttttcaaagacttccgcatacatcggatcatatgctgcactgacatcagaagagagcattctggaattcatcagggttcttctgactttcagttctgactcaccttccgtcagtgccaccagctctgcaactgtattttcaaagaaacgggaatgcatacctgtcgcaccaacgcttccgatctcttctttatccactaaaatacagcaggctgtatgctccacggcttctacatccagcattgcaaaaagagatgtgaaagcacacacacggtcatcctgtccgtatgcaagcaccatgctgcgatccagaccacaatcacgtgcttttcctgccggaacaatctccagttctgcagaaagaaaatcttcctcttccatctcataatactctttcagcagcttcattacatttgccttgacagcttctttttctttctcttccagactctcatcctgttcgatcggacgacttccgatcagcaggtccagcttttctccttcaacaactgtggacgctttcttttccatctgctttgctgcaagatggatcagcagatctgtaataacgaaaaccggatcatcttccttttctccaatgctgacatttacaactgttccatccttttttgcgatcactccgtgcagtgccagcggaagtgtaacccactgatacttcttaattccgccataataatgtgtatcaagataagcaaattcatcattttcataaagtgggttctgctttacatcaatgcgtggggaatctatatgggctccgagaagattcattccctcttccagtggctttgttcccatatggaacattgcgatggtcttgtccatgcatactgcgtataccttatctcctgcctgtactttttcaccgtttcggatgacctctttcaggttcttatacccttctttttcaattctttcaatcgtaagacgtacacattcccgctctgtctttccggcatccaggcaggccttataatcctcatttactgcctcaagacggctcagttcctctgcactgtactgactccatgcattttttctctccattgaaatctcctccttattttcttctgatctgtttccatctgatctgtatggtactgctctctccacagatactcacaaaatcttctcacatctaaaagagtctttttctaaccgaaaagccggtcatctctcgtatgagatctgatccggctttccataattccccgaaagactgcacaactttcgttccggagaaaggcaaatattctaccactcaaatttcttttcaaaatatgctttcagatcttcgatcttcactctttcctgctccatcgtatcgcggtcacgtactgtaactgctccgtcttcttcagaatcaaagtcataagttacgcagaatggagtcccgatctcatcctgacgacggtaacgcttaccgatatttccacgatcatcgaactcgcagttataatacttacataactcagtatataccttttctgctccttcattcagctttttggaaagtggaaggacaccgatcttaaccggagcaagtgccggatggaaatgcaatacggtacgcatatccggcttctcttctgttccgatgttctcttcatcataagcactgcacaggaacgcaagtaccatacggtctgctcccagtgatggttcaattacatatgggatatatttttcttttgtctcatcatcaaagtatgtgagatcctgtcctgatacattctgatgctgcgtcaggtcataatctgtacggtctgcaattccccacagctcgccccatccaaacgggaaaaggaactctacgtctgtagttgccttactgtagaaagaaagctcttccttatcatggtcacgataacgcacttcatcctctttcaggccaagagatgacagccagttcaggcagaaattcttccagtagtcaaaccactccagatctgtatccggtttgcagaagaactccagctccatctgctcaaactctctggtacggaatgtaaagttacccggtgtgatctcattacggaaagactttccgatctgaccgataccaaatggaagtttctttctggatgtacgctgtacattcttaaagtttacaaagatcccctgtgccgtctcaggacgaaggtaaactgtattctttgcatcttctgtaacaccctggaatgtcttgaacatcagattaaactgacggatatctgtaaaatcatgctttccacaggtcgggcatggaatctgatgttcttcaataaatgaactcatctcttcctgagaccatgcatctacagaaccttcaatctcaattcctttttctgcacagaaatcttcgatgatcttatctgcacggaaacgctcatgacactgcttacagtccatcagcggatcactgaatcctccaagatgtccggatgcgatccatgtctgtggattcataaggatggcacagtctacacccacattatacgcgttctcctgaacgaatttcttccaccaggccttttttacattattcttaagctctacaccgagatttccataatcccatgtattcgcaagtccaccgtagatctctgaacccggatatacaaatcctctcgatttcgcaagtgctacgatcttgtccattgtcttttcaaccattttatgttcctcgcattctttttcattttccatcatttgatacacgctgaaacgcccaccgcatcaatgttttctattgtagcggtttacggactattttgcaagacctcttacagcaacgtttccagaatttccagcgacttaaacttccgatccacgtaaagtcccataagccgttctgtcacttttgaaagctgctgcaaaatctccggcttcacgttaaaggtatacaaatgttctactttactgctttctatgtattgcatgctatataatgtggaagaagccagtctgataccgtcccgcacttcaccggcacatgtttcacagaccagtcctcctctgccggcactgaagactgctgtttctgccttattcccacaattcacgcactgaaagacctgcggtccctgtccgttgatcgtcaggatcttcagttcataaatgcaccggatcagggcatccggaatatgcggattcgtcaacgcccgcatcgtctgatacaaaagcttcagcatctcgagttcgtcgttaaattctctcgcataataattcgcaacctcaagaaaataaaaaccataatacgctcccagcacatcctcccggagttccgaaaaataattgatcacctttgccgactggatcgtataagaacttcttccctcatacatggtaaattcaccgaatgtaaacgggttcactactccgacaagcggactgttcggtcttctcgagcctttggcaaatgccgatacttttccctgttcttttgtaagcaaaacgacccggcggtcatattcccccaccggagtcgtcgaaagcaccatccctgtcaatacgatctggttcacgttgttccttctttctgccgtcatcttcccattctgaagactgaccgtctgcaatacaatttttataactaagataatccttgatctttccgctgtgcagaaactgatcccagtacattttctccatcaggccacctcatcctaagtctgcttctttctctggaattaggttccccggattgacttcattttatcatagtgtgcataaataggcaaacattcccatccctcattgacatttatcgcttccttttttataatcatctgcggagatagtatctgtcgatacagaactatactctgactgaatcactgaaatctcatctgaaaccagagatcattgcaaaagtgcaagagcttatatttttaggaaataagactcagaaccttcgaaaaagtctaacattctattttatcaaagattttttcatcattggaaactgaagtctttccagaaggaaaggataaaaaatgacaattgaaatgttaaaaggaaagatccaccgggcaactgtcattcaggcagaactggattatgtcggaagcatcacggtagatgaagaactgcttgaggcagccggtattctggaatatgaaaaagtccagatcgtcgatgtcaataatggcagtcgttttgaaacatacacgatcagcggagaacgcgggagcggcatgatctgtctgaacggtgctgctgcacgttgtgtcagcacaggtgataagatcatcattatggcatatggacagtattcatccgaagaagctgcatcacataaacctgcggttgtattcgtagatgaaaagaatcagatcagccgcgtgacgaactacgaacgccacgggcttctcaaagatatggacacataaaaagttccactatcatccaaatagttttccgggacaacagtgacttcagaaaagagcctatctccgaatcttaaaaagaggagaaaaaacatgcagataacaacaactatcaatgaaacgaaagaactgattaagaaatggaagaaagacggaaaatctatcggactcgtcccgacaatgggctttctgcacgaaggtcatgcaagcctgatccagaaatgccgggaggaaaatgatatcgtcgttgtgtccgactttgtaaatccgacgcagttcggaccaaatgaagatcttgaggcatatccgagagattttgaacgggacagccagctttgcgaacggatcggtgcagatcttattttctgtccgtcaccggaagaaatgtaccatgacccacacgcatttgtcagcattgatctgctttccgaaacgctttgtggaaagacaagacccattcatttcaaaggcgtatgcaccgttgtgtcaaaacttttcaacatcgtgacaccggatcgtgcttacttcggacagaaggatgcccagcagcttgcgatcatccgcaagatggtactggatctgaattttgatatcgagatcatcggatgcccgatcatccgggaggaagacggacttgcgaaatcttccagaaatacttatttaaatactcaggaaagatctgccgcactctgcctctcaagagcagtcaggacagggcagcagatcattcagacaggcatggacgcagaacaggtattggctgccatgcgtgctgtaattgaagcagaaccactggcaaagattgattatatttccatggtagatgcactgacaatgcagccggtagagcgtgttgaccggaatgtgcttgtagcaatggctgtctacatcgggaagacccggctgatcgataatttcagctacgaggtgtcattatgagcagactcttacatccgcttgaaaaaattgcatccctgctcacaaaatatatcggactgatcattatctgcttttccgttcttgcctttttctggcgtgacggatttgcgtggacgaccacttatacttctgtatttttgggtgttgccatgttcggcatggggctgactattcatatgggagattttaaagttgtctttaccagaccgaaagaagtgatccttggttttattgctcaatatacacttatgccggtcattgcctggcttctcgcaatggcatttcaccttccggctgatcttgcactgggagtgatcctggttggctgctgcccgggtggaactgcaagtaatgtcatcacttatattgccggtggtgacgttgctctctcagtcgggatgaccattgcctccacgcttgccgcaccgctgatgacaccgctgctggtataccttcttgccggtgcatgggtggaagtttccttcttcagtatggtaatttcggtggtaaaggtcgttctgatcccggtactcctgggcatttttctgcgatggatcatcggcaggcagattgaaaaaatttccggcattctgcctcttatttccgttgtatcgatcgtcatgatcatcagcggcatcgtagctgtcaatgcagaaaagatcctgacatccggttttgcggttctcggaattgtaatgcttcacaatcttgcaggcatggggcttggacttggagcttccagactttttcgtgtggaatatacaaaagctactgccattgcgatcgaagtcgggatgcagaacagcggtcttgcgatcacacttgccactgccaattttgcagccaatccatttgcaacgctcccgggagcaatcttcagcgtatggcataatatttccggatctgttttcgcaagtatacgtcgtaacggatataaccaggaaaacgccccggaaacccggagcgtcttaagcgaaacttcttcataaatatataacctggttttccacacccacgctgtatttgcaaagagtttttcaccaaattcacccctgctctgtggaatttctgtcttttccacaaagcaggggtgtttacatcgaatcattcgccaatattctgatcggtgcgttttgccctcaatggtttcattcaaaccagccaaatttctcacaggttttatagattccatctttcacattctcatctgcaacaaaatccgctttttcttttaattcatcacagccatttcccatggctactttaaaaaatctctcaccaaacatatttaggtcattgtagtcatctccaaagacaaccacatcttccggctttcctccggcataaaaaagcatccgcaaaattccttctcttttcgcatccggctggaacatcagatattctttttcaaaccgcagatgtccgactttttctttcgctgtcagacgctcttcctctgcttccgggatcgacacatacattttgaatatcttcttttcacgatcgggatcaaattgtggatcgataatataaacgcttggttctttccgcattcctgcctgttcatggaataaaaagtcactggcatagactttattggaatcatcgattgctgtataaataccataacctaactctcttgcctgatcgtatactgcttttgccgcttcataatccaaaggccggttctctcttaactctccctcataaatgattccgtgtccaccattgcagaccatatgcctgaatccattttcttttctgaatttttctgccttatagcaggcccgccctgtagcgatcgatacaaaatgtcccgcatcctgcaatttttttactgcctccaatgctgaaggtacgatctgtcctgtttttctgtctgttaatgtcccatctatatcaaagaaaaaatattttttactcaaacggatacaccatcccccactgatttcttactgctgtcagagtttccattacatccctgacgattgcaagattttcatttccaccattgttccatacataatcctgcatatccgccacctcatactgaagtgcctttgctgactctcctgcctcgatcacttcggtctttccactttctgtataagtgatcgttgcctttgccgctcttggataatcatagatttcgataaatcctttttcgcctgccaccacgccacgctttggctgttttgcacgcattgtcagtgccatgactgccatctctccatccgggtttttcagaaggattccgcttgtctcatctactccggtctcaaaataattggctgtcgtcagtacaacgtccggcttgctcttcataaaatatcttgcgaaagaagtcgcatacactccgatatcaagcaatgctccacctgccagttcttttgaaaagaaacggttctttacatcatattccttgcagcttccaaaattgacctgtaccattttcacatcaccgatcgcaccttctgcaatcttctttttcagctctttatacaatggcatatgaagcaaggtcattccgtcacagatcacaagccctttctcctgtgcgattgccacgcactcttccagttgtctgctgttgaccgtgattgatttctcacagaaaacatgctttcctgcctttaccgactgaagcaggaactgataatggagattatgcggagtcgcaatatatacgatatccacatccggatctgcgatcatttcatctgcacttccataagcttttgttacatgaaattcttccgcatactttttcgcaccttccagtgttgtatcacatactgcgtagatttctccattgactgcattcagtgcctcacccatttcatgagcgatccagcctgttccaaggattccccagtttaattttttctgttccattttttactccttctttccacttttatatatgtaatatttttacttcattttttcctgtaatgatcgcaccggatgcaacctgataaaagaagccatgaccgactactccgctcattgcatttaacgcatgattgagttgttctgcatcttcaacatttgaaaattttgcttccataagataatttccatcatctgtgaccgtaagtcctgtcttgttggagcagtgtctttctgtcacttccgctcccagcttttgcagctcctctttcacataacttctcgcacatggaagaacttctacagtgaccggatatgcaaagggaagattctcataatactttgtctcatccgccagcagaatgtagtcttctgccatatctgccaccagcttttccctggtatggattccaccacagctctttaatgcattgaagttttgatccagttcatcgcatccgtcaaaagcaatgtcaatctttgcaatccgggaaagaggtaacacctcaatcccatgctctctgcaaagttcttctgtatccatggagggagtaactgcctgaatcttttttcccgatcctgccagttcttcgatcagaaatccaaccgtacttccaccgccaagtccaacgatcattccgtcttttatcatttttgctgctttttctgcacatttctttttcacaatcttattctcctttcaccggtttctttaaaataccaagtaccacgcatcccacaagtgaaccgatcaggatcgacagtgcatacatcagcggatgaccgatcgtaggaagtacgaaaattcctccatgcggtgctcgcagagtacattcaaagaacatcgacagtccacctgctaccgcagaaccaatgatacaggatgggatgaccctgagcggatcgcttgctgcaaatggaatcgctccctctgaaataaaggataatccaagcagataattgacgattcctgattctctttcttttttcgtaaaacggttcttgaaaaatgtcgtacaaaatgcgattgccagtggcggaaccattccacctgccatgacggatgccatgatctcaaaatttccttctgcaagctgcgaagttgcaaatacatacgatgtcttatttaccgggcctcccatatccactgactgcattcctgcacagatcgttccaagcaatactctgctcgttccgttcatgctgttcaatgctcctgtcagagcatcattgatcattcccataaatggattgatgatcgtagtgaccactgctccaagcaggattcctgctaccggataaatgatcataggtcggatactgttcagactctgtggaatcttgctggtaagttttttcagtccaagtacaacataacctgctgcaaaaccggcaaataatgctcccaggaatccggcattgacatctccccctgccgggtttacaaaggtacatcccgctttggcaaccagacctgctacaaatccaacggcaagtcccggcctgtccgcaatactcattgcgatgaatccggcaagtaccggaagcatcattccaaatgcatattctccgatcgttttaaaatacgcagcaaccggtgtatttttaccaaagtttgatggatcgatactgtaatcatctaagagaaatgcgattgcaatcaggattcctcctccgattacgaacggaagcatatgggaaactccattcataagatctttgtaaatctttctcccaaaactttctttcacttctccggtttctgtttccatctgtccatcatgatgataaaccggaacatctccattttcgacctttcggatcagttcctccggcttatggattccgtctgccacttttgtaatcagaactttctttccgttaaatcttgcgagatctacattcttatccgctgcaataatgattccatccgcttcttctatctcctgtgcagtcagcacattttttgcaccgtctgccccctgcgtttccacttttacaggaatccccagttcttttccttttgcttcaagactttccgctgccataaatgtatgggcgattccggtcgggcatgccgtaatcgccagcactttataaccggtctcctgatccacaactgctgcttttttctcttctttttcactctggcttcgctctttttcatcgatgatcttcagaaattcgtctacattttcagaacggatcagcttctcccggaatgtatcatccatcaacatggcagataatcttgataatgcttccagatgttcatttgctccattatccggtgctgcgatcatgaaaatcagtttcaccggttcaccatccagtgaatcaaaatctacaggtttctttaagaccattgccgcaagacccgcactttttaccgcagcattcttagcatgcggaattgcaatcccttctccgattcccgttgttccttctttttctcgctccaggactcctgccagatactgtttccgatccgtcagattccctgaagcttccatcaatactgtcattttttcaatgatatcttttttatttgcagactctgcaccaagtgctatcgactgactgctcagcaattctctgattctcatataatcctcccttaaaccttcaatcaatcttttcagtttagtgtaactttttttcatccaacaaataatcgcgatatttattttctttatttgaattatatcatgtaatttattttcgtcaatgtttctttgttgtgaaaattatttttattacaattcactaaaaaatgctgctgatttttgtgcaaaaaatagccaggggaaatgcttaccaataagctccctggctattttttgcagttacagtctttttatctttccgtttatctttatatttatatcctttatatgatgttggggtcaaaagcccccaacaatgatgccaacggattgtttcgtgctacgcactcccacaatcctacccgctattcgcatatcatggtgcttacgccccacttttatgctcatatcggggcgggtctcaaggtcattctaccaccagtgtgcaagcacacgtggtttcagaccttttgaccctgacatctttatattttttcatctgccataagattctcacactcactcaggcgtgaatagctttcttcctgtcctaccgttaaaaataaatacaaaatctctatcaccgtcatcgctgatactcttgaaaaacagaactcattcataaataatttctctcttgtggccgtctgaatgtgataatctgcctctttcgcaatcgtagaatttggattattggtaattccgatcgttgtcgccccgttctttctggccgcacgcaccatttttacaacctgcttggattcgcctgaatttgaaattgcgatctgaacatctgactttttcagagtcattgaaaacgacaactgagtctcccagattgatcctgccatcgccgggattccgatctcattgagcttatatgcaccgtccagtgccaccggaattgtatttccaacagccacaaactgtaccatccccgcatgctggatcttatcaaggatttcattcaactgtttttcatcgatcagagaaaccgtctgcttcatctcttcgatcttattggcaagaatattctgtaacgactgtccgatgtcctttcttgaaatatcattggataccctgacttcactctctcccaggacaagttctttcgccagaccgatcttcaaatgatgaaatccatctacttcacactttctgcaaaatctcgataccgttgccacacttgtcccgctggcatctgccagatctccgatcgtcatattgatcacatctttataattctgcaaaataaatcctgcaatctttttttcctgttcaaaaaaactgtcgtatcgtatctgtatagtatctaaaaccgactgctgattttccatgaatatcccctccgagaaaatttttttcatgtattcatactatatcactttttacagtttcgcaatcacctatttatctttctttgggaatttttatgatgtcagggtcaaaaggtctgaaaccacgtgtgcttgcacactggtggtagaatgaccttgaggcccgccccgatatgagcataaaagtggagcataagcaccatgatatgcgaatagcgggtaggattgtgggagtgcgtagcacgaaacaatccgttggcagcattgttgggggcttttgaccccaacatctttttatttgttggggtgatacgcttataaagcaaaagacttctttatggcgaagcggacgcggaaagcagggatattcactcaacaatgcaaatttatccaactacagccagtatctggctgattccatcaaccgattctctcagtactgctgcgattgcatccaaagaatagccaagcttttgcatttgaaaggcaacttcctttttgtgggaggcttcgccctccgcaattcccgatcgtctgccctgttccataccatcctgaacgccatcattataaatgtcttccagtgctttacacatatccagttcctccctttcgttcttttctacgtttatctccataagctgccgggaatttaagaatgctccaagtgcatgataagtctccaaatccagcttttggaaatagtctttatgatttgccacatatgtacgcaatgcgtatttatcctgactatattgtagcataccgaagatgatttgtaaatcactttgaaaagattctaaatttttcagtcttctgacatcgacgaggttaatgtgataattgggaagatactttttcatcagttccgcatgcttcttttctgtcccaagatcgaacatctgatgcagttccaaaggtccatcccactcctctgtcccataatagaagatcaaagtaatcaccgggatgagtttatcattcttttgaaaccgggaaagaaattcagccgaagaaagacggggcggacgttctttccatttgacccgcacctgttctgcgtattccatgctgtcatagagcattactttcaacggtgcagcgtaatgaatggcagtctgtgattccaccgccagcagcatcagcagagcctgatcctgccagttcatgatgatatcgcggtattgcttttttacaacatttttcccctgagtgtcctgaagactgactgcggttgtctccgggctggggtaaaggttctccggcaggattacggcttttccctgaaataaaatggcgttgaacagatctgcgaaccgtttcgtatccttaagccaaagattaacatttacatctgcttgtcccataggcaagtcctccttaataaaaatataatcgttatcatcaaaatgaaaatctctgaccgaaatggtcttgaaatatgaaatgctctccatactggacatcagacatagaaaacgggaattggatctgtctgagattttgatgtgaaatgagtataaaatagtgtaataaaaaaatcaattaaaagagtttaaagtttgtatgaaataagtataaaatttgtaattgttggggagaaaatatctcggcagtagaaagtatctgatgaaaaaacgttcatatccgcccttgttgttgcatcgcagtgcaggacccgctttacctcagcccgttgacaacttgtaacaggaacgtggaaacattcgtgcagaggcactcctgtttacgttccttaacaagttgggcaaagtgtcttcggaacgctccctgtcaatgcactgctcacgcaacagcaagggcggatattaggcttttcaaatcagaaaattttccctcatgccagaaccttttctcccaacaaagacgatattccaataagaaataaagagccggatggctatcaactaagataaacgctccatcaaatagtaaatacaatatttactgtctaatatttacgatcgaatatcttagccaatagccatccggcttttttctatccttttgaaatttgtattgttgagtgactacgctgtggagtcagaaaaaaacttcttactgtgactaccagcggaaagcagggtgttcctgagcaggtgcattagcaggagcgttccgaagacactttgcagcgtttgttagagaaagtaaatcgagtgccattgcacgaagatttccactttcgagttacaaacggtcaacgggctgaggtaaagcgggcctgcaccgcgaaggaatatctctgatttccgcgtccgcttcgccataaagaagtcttttgctttacaagtgtatcattccaacaactacaaacttttatggatgatcctaaaacgaaccaaagcaccccagattctttccggcgatattgtcgcaatgactttcattggcaaactggtttctgtattcgtcacaatctacacgatcttcgttgttgcaatcgtgacaggtgttgtggtcaattattacggacagatcgtagagatgcaacgtcgtgaaacagcaatgatgttcctggataaattagaacgtctcccggaactttccaaagaagacctggaagacatctcaaaaagagtacaaaaattccgctgagtgttcactcaacggaatttttgctttccactttttcttatctttatgtcttctatttctcggatacttctgagtttgtatctctcacctgcggaattaatgaagctgccagtttcccttttccacgatgtgtcagatataaaattccaattacagaaaatacaacagctccgacaaaattcaccataagatctttcattgtatctacgattccaatgtctaaatatccgcccagattccaagtctcaccgttgatcacaacggactgaacatctacattgatcgggatatttgctcctgtcggattcagctttactgaattgattgccggaacaatccagtctttctgcatatccattccgaagaaccaatccatactgaattcaaagaactcccacaaaacaccaactgtcattgaaaaacaaaatgcaaaaaatgccacaaaatatggggacatcttaattgagaatcgatcacttcggttgaataaatcaatcagtgcaaacccgatggctgccatcaaaaatccattcgttgtatgcaaaatggtatcccataccggaatctttacataaaatgcattgatttctccaagtatctctgccgaaaagataaagatcagaatcaccgtttccaaaccaaccggaattgtcactccaagtttcttatcaataaactgtggcaccataaataaaatcaatgttagaatcccaagaaacatattgtgatagttcccaagaaagaattgtctgataattgagacaataaccaacattgtcagtatcatctggactcttgttctatttcttgcttttttacttaattcgctcatttcttcccctcctttttctctcaacacatgcggtcaaaaacactttttattgcatatttaggatataccgcatcttttttcaacaaaaggtgtcaggccgaagtttaaaataacagtttccacatatgcctgacacctttctatctatcgtttatagattcacttttattttacttctgttttcttcttctaataacataaatcattccaccgatcactgcgattgatcctgcaatcatcagaatccagatgtagctgatgctgtctcctgtctttgctgttttcacctgttttcctgacactgaagttcctgttggtttctttccggcagtacctgtcgatgtttccttcgaatcggttggattctttgtttcttctttcttcacgatctgatactctatctgatagtctgtatcctctccgtgaagcacataattatcactctgttcgccgatcattccgacaatagtggctgtatatgttccggtcttgatttcatttccaccttctacaaccgccttgcagtcatcttcgaacaatacccctgtaaattctgcagacacatttgcttctttccctgtatcaatcacagttccgtccgtattccatgcaacgcccagtggttttggctgtacctgcagcgttcctggtttaaacagtactgtgtaattcacattatctgctgtcaacggagttttttctgtaatatcataaagaccgaccttacagttttctttttctgcatttcctgctgtcaatgtgacatttattttcaaatcctctaactgatcatcccctgccagacttccatcactgattgaccaggtatactctgtaattgtctgtccatattctttctccatacggtccggtctgatcgtaagctttctcggcaatacagttacaggaactgatgacgtaactgttttataattcggattaaatggagtgaagatcatctcctgctcactctggttctctgctaccgtaagcattgcagtattatctgcaaaacgaaatacaccattacctgactgacctgtacgaactgcctttctcaagctatctccataagtcacttctactgtagggaaagtcacttccggatctgccggaagaatctcatatttccatacacacacacgtctcatgccggaaaagatataattcgcatttgtcagtcctattgcaagtgctttataagagccgacttctgtacgctgtgcattcagcagtctcttaatctcacagctgtcattttctaaaagactgtctgctttcacgtttgcttctattccacatgcatttcctgtatatgtatactgtgctgccgcattccattctatctctgcttcctttggtgatacattaaggaatgctggacgaactacaacatcataattactatttgatgcattatctttcagaataacatattttcctgcatttccataagcaccaagaatgtcatctccatcttcatctattgtacttcctgacaaaatatcttcctgtacgattgttgttgctttcagtgtcagtccaagactatcaactgtatctcccggaagaagtttctccttttctgaatcactgatcgtaaatgtaagatcttcacttgtcaatatctctccgtatgtctttgctttcttttctgcattgacaacaattctccgtgcactgctgctttcatcaatcgcttcactttgcaactgttctatctcctggatttccatttcatctgttgcatttgctgaaacgacttccgactttttcactgtttttaccggaacgcacatagtaacacttttgtattttttattatctgccggctgaaagatcagttcaaattttgtctgatctgtcacttcctgatctgtcacaacatgatctgcatctttgaatacccatgcccctgccggtgcatcttcaatcccttttaatgtagcttctgccagtgtctgaccatattcaacttctacttccggtgtcggaagctttggttcaaatatcaggttgctgtttgtctcatagatcaaccgtgccattggatcatcaataaagttaagcattactgttccaaggaatcggttgtcaatacaattgccttcgtctttaaataatctcggattaatttcccgtgtcaatcctaacggtgctcctcgtgagcaagaagtataattaaatacccaagaattgtactcgatcggatggcttgtatcctgtcctgttgtttgcttcattgtttctaatatatacggccacttctcacttccatatgtattatatgcatcctgaatatacacatgattttttccatcatcatataatttatacgcatatttataatctttatattttatgtcatcccaattcgcaaggttaaatcccatcgcacgttcaaccgaactttcgtagttcttggttagattaaatcttcgaagaaatatgatttttccccttgcttccttcattgatgggatatcccctccactgtagaccttgtccttatttttttcaataaattcagctaccgcatgctctaatccaattgtagaaccggcatctgattttactgtaagaatgactgtttctgacttatgcttctctaaaaagccgagggaggtattgaggattgactgtaatgtaagatcacttccgtttttttcctgacactgccataattcgcctccatgtactatctttacgtctgccacagaagcatcatcttttgtcgcatttgcacggatatcaaagctgcgtgctcccatatttaactgttcatcataataaagattctgacatgatgtaatggatacctgtggtatatcatcctctacaactcctgctgttcctgtatcatgtgttgccggaatatttacagatgataaaagtgcatcatccggaatatttgccatccagttttctgcataatagtacttcgtcttctctgtgtttcctgccaaaatagacagatctattttcgttccttgttctccaagctttaatccattaacagtctccagaatgtacaaaccacttcttgcattctgaatcaggtatgttccatccgattgtttgaaaaaacgccaaagctggcttgtattttgattatgatcaaattcttcttctacccacaaattaatagtggtattcattcttcccgattctgattgcacatcaagagcaagtcctgtatctttttctccttctgaaatgctttcgatttgataagcattataatccttaacccaggtcagcttccatttacttgttgttcccattgtataaaaatgaggaagtgcaccaggaaccagactatccgccattctgtttaaagctgccagttctccggctttgtgaatctcacagacggctgttttatcatctttgtgcagtacctgactttcctttcccgtaaacggaaccacggattttgtaatcaaccagacttttctatttttctcatctgtctgaatgatctttggattgttattattcagttttccttcatatccgatccattttccactgtttctatttttaatatagtacctcgcatttccatttgcatcattaccaatataataaaatgcaaactgacggtgattgtttccctttactttactgtctgaagactcccataaatgaagtactgcaccgttgtttttacttttaccatctacatctgcaaaacggtccgttccatcaactttaatatgtttaattccataccattcattttctatatgatctaaccgaaaacgacaattatctcctcctgaagtatccaaatgaactacactgtttttttctgcactatcgtttacattccagcgatatctcgtattttcctcaagtgtaataaataattcatttcctgtctccatcgtctgtacactttttccaccggaattctctgcatttacactgactggtattcctgtaagtgtgattgtcatacatatgagcactgccattattcttttgatttttttcatgtatttctctcctcctcatcgtatttaggcaactccatttctttttattatatttttgatatctttttttacaatatttctgacacgaattgcccgaaaatggcacgaattgtcattctgtggtatactagttttagattttaacttaactatctgcttgttatcggtcatgtgtagtgtgtaaagtaatatttccttcaagcagatacaactctgggaggattttcatatgacaatcgctattgttgatgatattaaggaagaacgtgttctgctacgaacacggttagaaaagatttttcatcagaaagatatgggatttcattgctgtgagtatgagaatggggaggcatttcttgaagcttcgaaggatcaggacatcacagttttatttttggacatttatatggatggtgcaaatgggattgaaattgcaaaggaattcaggaaatcgaataaagactgtctgctgatctttacaacaacatcctcggatcatgcgttggaaggttttcaggttcgtgccatgcactatcttgtaaagccatataccgaggatgaactttcttctttaactgatgagattttgtccagaatccccactcccgagaaaacacttccattgaaagtaaatgggagtgaatttcaagtaccgtttaaaacgatcgtccatgcagatcatttttctcatatgatccacattcatacaactgcaaaaaaagaacttgtcatccgacaatccttcagttcttttactgctccattaaaagaagattcccgcttttttgtctgcaacaggggaacgatcattaatatggaacatgcagttgattttgatggaacgatgtttctattggatgacggaagcaagattgctgtcagtcgagaactaagcaaactggcacgacaacactttatggattatttatttcaaaggggggatttctaatgcgtacaataatttttcaggctttggaatttacagttctgattccgggcatgttgcttgcatatctccctgtgaactcatctttaaagcaaaaacctaagaaaatgattgcctggatgcttcctcttcttgtcataatttcttttttgagtggatttgtatgcaacagatttcatttatcaacaagaatgattcttctgccgcttctgtttcttacgtttatcctgtatcaggcaacactgcgaatctcactatggaaatccgtcagcatctatcttgctgtctgtgcagttttttcttgctttaacagtctcgcaagagcaacgtctgctatgcttagctttaattctgaagaacaggctttttctggattctccgtatttgctgtcctatataacattttctgtatcctttttgttatattgatctggcatccggcttctcacgttgtcaaggacatggtcgaggatgaaaatcttgcccagacatggtatgtattctgggtacttccggttcttatcatcggattgaaccttgttctcattccaaaatataatacgattctgcacacacagcgtttcttgcgcggatacatggtgattgtttacgcccttcttcttattctcgcactgttttacacaatgtttctgatgatggctaacattttgaataaaaaccaaaaactgcagcaggaaaatctgtttctttctgtacagcaggaacgatatgagaatttaagatctgcaatcgaagaagcaaggcaggcacgacatgatattcgtcatcatttcgttcaattatctgtcatggccgaagatggtaatctcgagaagataaaggactatctgcagaacgcaatggataaaattcctggctttgattttcatttctgtgaaaatcagtctgttgataatgtgatcggatattattatgcgttggctcagaaagaagagattccgtttgatgcacgtgtcgatctgcctcaggaactttctgtagatgaaatggatctgtgtcttatcctttcaaaccttcttgaaaatgcattggaagccagccgcaagactacaatgtcacggcagcagattttgcttgagatccgccagcattcagcttctcttcttttaattcgggttgagaataattttgatggaatcatcaaagaaaagagccatctgctccattctaccaaacggaaaggtctggggattggtacccagtctgtccgcagaatggcagaaaagaacgatggttcttgtaatttcacttatgaaaatggagtcttcactgcaaagatcatgcttcgtgctactctttaggttgctcctctttaatatgtaaagcgaagggcttttgatcagtctttcgcttcttcgagtttctttttcccagaaagcattttatgtcctgaataaatagccatccggcttcttcctattatttttaaatttgtattgttgagtgactacgctgtggagtcagaaaaaacttcttactgcgactgccagcggaaagcagcgtgttcctgagcaggtgcacgaagatttccactttcgagttacaaacggtcaacgggctgaggtaaagcgggcctgcactgcgaaggaatatctctgtttttcgcatccggttcgccacaaagaagctttctgatttacaagcatatctctccaacaactacaaatttaaaatacaaccaccagcagcattttaaattgttcttgtccataaactgcatgtggatgttttgcaggcattacaatcgattctccttcatgaagaatatattcttctccatcaatcgtaatctttcccactccgtccaggcaggttacaaatgcgtctccaccggattcatgtgtgctgatctcttcatctttatcaaacgcaaataaggttacactgagatgctcgttctgtgccatcgtcttggaaacgacctggcctttctgataatcgatctgctcctttaatgttactacttctgctttttcaaaatttttaattcctgccatcttttttccccttataaaattcttccgtcaatcgagatcgttacgacctgccatggaagaaattttccactattttttaaagcttttactgctgcattctccaatccgccacagcatggtacttccattctgagtaccgtcacactttttatattattctctgcaatgatctgtgtcaacttttcactgtaatcaatttgatctaatttaggacatccgatcaatgttatttttcctttcatgaactcctcatgcatatttgcataagcatatgcagtacaatctgcagcaatcagtaattttacatcttcaaaatatggtgcattaacaggaacaagtttaatctgacacggccactgctgaagctgggactgcaccgtctcccgagatacctcttcctgtaaaccacgcctgttaaattcgcggattgcctgtccagggcaacgatgcacagcggaatgaagttgatctgctttatgggtttcttttctttccatattagcttttactgctgcctcatcatatgccgcagcttctctttctataaaactgatcgcaccggtcggacaatttggaaggcaatctcccagtccgtcgcaataatcatcacgcatcagtcttgcctttccgtcaaccataccgattgccccttcatgacaggcggtcacgcatattccacagccattacatttttcttcatctatctgaatcactcttcttatcatattatatcttctcccttcaatttctattgcaattatattataataaatttaatatttatgtggttataaccacgaaaggagatttttatgaaacttttccacactccgcttttccttggaatcacagaatccgaatttgagaccatgaaagaattacattccatgcgttcttcttttttctttaaaaatggaactatctttcataccggggatctgatccacgaaatcggaatcattgaatccggtagcgtaaatattgaaaatattgatcttttaggcaataaaagtattttaagcaatatttcacaggggcagatttttgccgaaacttatgcaatctgccatgaaccgatgctggtcgatgtcgttgctatagaggatacacaagttctcttcgctgatcttgatattctccttagcaatcggtatgcttctcagccatggcacgcaaaaatcatgcaaaatatcctgaagctttcggtacagaaaaatctggttttatcgaatcgtattttctgtacttctgctaaaacgatccgctcccgccttttaacttatctgtccatggaatctgtcaaagccgggaatactacctttcagatcccctttgaccgacagcagctcgctgactatctaaatgtagatcgtactgccctttccaaagaacttgggaaaatgcggactgatgggattctcgatttttataaaaataagtttacgctgcggtctttctgaatccctgactgaccgctgcataaacttttcctttgtcttttcctcttccgggatacattcccggctattttttaatcttatatgttcagacttttatctttctgcccacttgttctcccagcttcaccagcgtctcatacccggcttctgtattccggatcagatcttcatccggctgtactttgcccggttctgtcatcaggatcacagttgatcccccaaactcaaacattcccttttctgttccacggcagaccctgcagtttctctgctcatgatttttgatctttcctaccatcaaagcaccaacttccatcatcagcaccgttccaagagtttctgtctttaacagacagtattcccttgcattcattttgtagatcggacaggcatcattcgccaccggattaactgtatgaaggattccttttatcttcttctgcgaagactttattccatctgccacatagcaatagcgatgataatcatccaccgtcaaccgcaggatatagatccagccaccataataatgctttgccagatgtgcgtcctgaagtaattgctctgctgtataagccgtatgcttgatctcaaattttcctttttcacagatcggatatacactcacttttccgtcacacggactgatcagcacttcttcatccatttccaccggacgttcttctgctttgatctttcttgtgaaaaattcattataagaagcaaactcctgcttttcatattgactgagattgatctgattcttttcaacaaatggatggattgccactgcagaaagtcttgtactcagaaacgttccgccaagctttgatacccagggactgagaaaaggacggatcagaagtcttgtcgcggtatgcgtataaataaacttcagcagcctgtcctgtcccgttgttccctttgttcggtttccatttctatctacataaatcatcgttttctttcctctgtatcctgccttactgacatacatgtaaaattttaagtactgcggctgccactattactaccagcactaccagtgttgcatttttcggctttctcaatttaaaatcagtaataaataaaagtccgactacgagtaccgctgcatgaagtgctaccataaactcttttccaagcaatgggcggaacactacaaccaatggaagaatgatcgccatggatgtaatcggaagtccctgataacatgcacgcttctcatcggtctctttttgtctgcactcttccgtcacattaaaccatgccagacggatcagtcctgcaaggacatagaacattaagatcaccattccgatcgggcctctcatcccaatacaataacagatgatcgccggtcctaccccgaaacagacgatatcacacaacgaatcaatctggattccaaagcatttttcttcttcggtacgatcctttttcgtccgtgcgatcttcccgtcaaacatatcacacaatcctgaaattgccagacaaagcacggccagattcagatgtccgtttactgacagcatcattcccccgatggataccatcagacttacatatgtaagcactaccgtataatcataaattcccaacattttctctcacctttttcccttttcctatagtaaaattagccacgatcgtaagtactgcacttacaagcagctctgtataatatccaagtcctctgcttaaaatcattcccggaagaagcagccccgttccaaagattggtgcaaagataaccaggaacagcttttcgctgattcccattccgcccggaagtggcagcatatccactgaaaccgagatggttgactgaagcagaataatcagccacgcactctgacctgacaatccaaatgccttatatacaaaccatgtagctgtaaaaagtgcaaatctctgaaacaacgtaattccaaatacatttaccagcacttttacatgattcttcagatacactgccgtttcccggtactgatccatggaggcattgagcctgtcgagtctggactgcttccttttcatcagatgcatccgctcaagaagtgccattccttttacaaggattgttcttgcaagtaccggatgaaacacaaggatcagcattgtcaccacgcagaaaacgttcagccccgttccaagataaaaaacgtatctgacatcataaagatatttatgtataaatccctgcccgaaaaaagtcaccacaactccgatgacaaccagcaccagcttatacgtgatcgttacgatcataagcaccagtgttgacaccggaatcgggatcttttcctttttcatataataaatctgtgcaggctgtccccccgaagcagacggcgtaatacaactaaagaaaaatccaacagacgaaaacaaaaagcaggtccacttttttcttttgattccaagagttctcatcatataatagataatgatggattctccccatataaatacgatcacgcatataaatccgggaatgagacacagcagattcacggtcttcaatatcctcgcaatctctccaagatcttccccgtggaagactccataaattgtaccggcgaatacaaggatcagaaataccacattaaacgccatctttttcttattttccatgattttatcgtcctaatcttctgcttataccgacagatatcttttcattcagtctctgatatgtcttccagccattcgtccggttgctgataaaccaggtcagctcagctaccccgatgcctcctgccacatcccataatacatgctgtctcgttgcaagcgtagaaatgaagaccgatattgcaatcagtactgacatcagcttataccactcaggaatctccttacactttctaagaccgatacagcagaaccaactcgccatacaatgaatcgacggaaacaggtttaccggcttatcaacggtatataaaaatcgcattgcccgaataaaaatcccatttcccgtaagttccggcctcgtatttgtcgtcgggaaaagcacaaaaaatgcaagacagatcagccgtgcgtaaaaatctgccgtgtaaaatctgtatttattctcatcttcataaaacgctaccatcagataattgactacccagaaaatgtaacagccaaaataaataatgataaatgcaggcataaacggaaccagttcgtccaggccgccggacaggttatgcgatcttcccgtccccacgatcaaaggtgctccccaataaaccagcgaatttaccacaaaggtaaataacggtggtaaaacgatcttacataattcttctgaattttttcctttaagtaactttaattttcccatgttttccattttagacgataattttaaaataacaactatctttcgtatttcttaaagaaaaacgtatgattctttaagatttacgacatatcatcctccctgtatccaaagtttttcatcatataatcactgtcacgccagtttttctgcacttttacccaaagtttcagattcactttgcagtctaaaagccgttcaatctcataccgtgctgtgcttccgatctttttcagcatacttccctgctttccgataataattcccttatgtgaatcccgttcgcagataatcgttgcatcaatatggcatactttcttattcatcttcatctgatcgatcgccactgcaattccatgcggaatttcttcattcagacaatgtaatgccttctcacggatcaattctgcaacaatctgtcgctccggctgatctgtgaccgtatcttcatcataaaactgcggaccgtacggcagataattcaaaatgacttttacaagctcatccgtattatctcctgtccttgcagaaaccggaacgatctctgcaaaatcatattcttttctatacgtatcaataaaagccagaatttcttctctttttaccatatcgatcttattgataacaagaataaccggtgtctttaccttcttcaactgctcaatgatatgcttttctcccgctccgataaaattagatggttcaacaagccaaagcactacatctacttcatttaaagaacgctctgcaatattcaccatatattcgcccagtttattttttgccttatggattcccggagtgtccacaaacacaatctgcccctcctccgttgtaagcactgtctggatgcggtttcttgtcgtctgcggtttatttgacgtaattgcgatcttctgtccgatcagatggttcatcaaggttgactttcccacattcggtcttccgatcaaagttacaaatcctgacttaaagttttctttcatctctgctccttcttcttttcatcccagtattttaaagtgtcctgatctctccaaacatttccttcgcttcttcgatcttctcctcgcttccgatcacacacaattctccggctgccaataccgcctccagtactgttgccagtccacggatatcctcctgctgtgcatccaggatctgttctctttccctgcggatcatctcttctgtaatccggttcatatacagattcaatgagcggctgccctttgccgccggattcatcggacggtctaaattactgatcgtaccgataataaacttattcatatctctgtcatctatatcaaaattcttcagataatctacgactccttcgtaaatttccatcgtcttttcaagattcggatctctgtaagaaactaaatacccctctccgatccggttaaagccgctcatacagccatacgctcctccttttacacgtacattctgccacagataatcataacttaaaatgactttcagaatctgcaatgcacccgtatattctgctccaccatcaataaagttaccggtccttgccacatactggactttggaggaagttctgaagccctcatttctcttcttacagtggatgatgcactgtccgtggctctctttttctcccgtatgaagtgaatctgcaaactgtggcactgctttttccagtactgcaagtccctcctgtgcggaagtataactgagcataagattctcttttctgaaaatacgtcctgcgatctttttcaaattttcgatcaacagttcttttctttcttcaaaattctcttccagatcttttacaacttcataaaatccaattccactggtaatatccctgaatcttgcgatcggagaagtgtaggaaattgaacgcagtactgctgtcgtatgtccggctgaaaggaaagaggtctgaagtcttgtcttcagcatggataaaatttctttcagacgcttttcatctcccagcttcgactccatcaggatctcacgcatcatggcaaaaagtacatccagcttcggataaagtgcttttcctttgatttcaaacgttgcacggaactctttttctttcacttttgtcacatctgtatacagctccagtgaagttccgattccaccggtatgcacattgatctcattgaaaagttctccgtatccataatgctctgtatcaatgatgccgagaacactctgcaggattcctgcatatggaagcagttcttcttcgatttccgaaagatcgaacagagctgtcacatatccgattccattcgtctccacatcgtgataaagcaatttcactccgtctgtctgacgctcttcattataaattggtgcaatctcccttgaaatatcttcccgtccgagaaccggtatctttgcaagatcttccggtgcagactcttcttcctgatacgcttccagctccttcgttgcttttacaagagctgcgatttcttctgctgaaagaccctctttatacgcctgcagacgatctgccagttccttatccatacgtgccgtcatcccctgttccggtctgatgatcacgattgaaccatgcggattgtctaaaatgtattcacggatcagctcttcaaaatatcctgtctcaacctgctctttcaggaactcaaaggtcgggattgctttcatatggataaaaggcttttcttcatcatataaccaactgtcaaataactggagtccatacatcagtccccgcggataacttccgaaatctgcctcccggaaacggaattcatgataattaattcccgcccggagtgcctttttatcgattccttcttcagcaatttttctcagtgtatcctcaatcgtactgataaatgcctctttctgctccacgttggcattctttgcaacaatggagaataccggctgataaattccactgtcaaaagaaccggatacatcctttccgattcctgcatcgatcagggctttcttaagcggtgctcccggtgcagacagcagtgcataatccagaatctcaaatgccagatataatttctcatccagtgacgttcccactactttattatacgaaagataagtattatcttcttcactttcttcactcgtaatcgaataattctgaactacttctctcatctcagtaaatggcttttgcagatggatctctgaatcaaccggttcattttcaaagtgagaaagatatttttcatccagccatctcagtttctcttccatatccatatcgccatacagataaatataactgttggatgggtggtaatactttctgtggaagtccaaaaactgctcataagtcaactgtgggatcacctcaggatctccacctgaatcaactgcataagtcgtatccgtaaaaagcgaactctggatctcgcggtccagcacaccttccggtgaagagtacgctcctttcatctcgttatatacaactccgctgatcgtcagttccccatccggatcatccagtttatagctccagccttcctggcggaaagtcttatcctgcttgtagatatccggataaaataccgcatccatatacacatgcatcagattctgaaaatccttatcattgcagcttgcaaccggataaaccgtcttgtcaggatacgtcattgcgttcagaaatgtattcaaagatccctttaccagctcgacaaaaggatctttcaccggaaattctctcgatccgcacagaactgaatgttccataatatgcggaactcccgtgctgtcggacggaggcgtacggaaaccgatcgtaaagaccttattttcatcatcattctccatcagaagtactctcgcaccactctttttatgcttcagaagcgttcctttggacttcaaatcagataaatcttcctgctgaagtacttcatatgctgtcagatcatatatgctcattttttctctcctcgttcttttttctgttacgtgaaacttctgttatgtgaaacttctgttatgtgaaacacatataatggtaaaaatcctatcactgttcaatagtcctagtatagccgattttaacggtaaatacaagaaaagccataatccaaataagttttatcttaagcaaaaaaaatcatctgcattcatccctcttgacaaaatccgaaatcggatatacaatcagccatactaatccgatttcggatatacactgaaccattttttcagatttacattttttgactggaggtatctcatgactatacaaaagactctgcaaaaggactccgtcctcatcggacaactggaactctataaccggctttggaaagaacaggatgatatctggcagaaagctgcccgcaaatccggtcttccacgcacttcttactggattttatatacgattgtcgtaactgcaccggcaccgctgagtcaggcagatctttgtgaaaaatggtattttccacgtcagaccgtaaattcagccgtgaaaaaactggtttccgatggactggtctcacttttcacgcaaaaaggatctggaaatatcaaatacctccggctcacaccaaagggagaagaacttgccgcagcttatgttgccccactggtacaggcagacatccactctttttctgctttttcagcggaggaacgcagccttctcctgaagctcatgcagcaacaactcacctcattaaaggagtattctgaacaattatggaactgaaactttctgaacattttacttataaaaaactgatcctctatgtcctcccctgcgttgccatgatgatcctgacttctgtttacagtattgttgacggattcttcgtatcaaattatgccggcaagaatgcatttgcagcagtaaatctgatcatgcctgtcctgatgggcgtttcttctctgggatttatgatcggaacaggtggcagtgcattggtagccttttatcttggtctgaaaaatcctaaaaaagcaaatgaagtcttttccatgctcatagaacttattcttctcggggcatccatcatcgcttttttgggctttatctttatgccgcagatcgtttctctgcttggtgcaagcgatctgatccgggaagatgcaatcctgtatgggcggattcttcttctttctgaaccattttttatgcttcagaacagtttccagagtttcctcgccactgccgggaaacaaaaactcggacttcggatctcgatccttgcaggactcaccaatgttatactcgactttacactggtcgggatcttaaagtttggaattaccggtgctgcagttgcaacctgtgccagcgaatttgtcggaggctttatcccactgatctattttctgcataaaaataacagcggactgcttctgcgtcccgctgcctttgactggaaaagtatccgcaaagcctgtggaaatggatcttcggaaatgttatccaacctgtccacctccctggtatcggtgatctataacttccaactgatgcgtgctgctgccgaaaatggaatcgctgcctacggagtggtcatgtatgcctcttttatcgcaacttccatctaccttggatatgctatcgggatcaatcccatcgtcggatatcattacggggcagataataagtctgaactccataatctgctgacaaagagtctgcggatcacaggagtcactgcactttccattacactgctttccgaactgctggctcttccgatcgcccgtctgttcgtaggatatgatcttgttctgtgcgaaatgacacggaccggctttatgctttatgcaatttcctatctgttcagcggatttaatattttcggatcagcatttttcaccggactgaataatgggaaaatttctgcgatcatttccaccctacgtactttggtgatccagacactcgcactgctgatcctcccgatatttttcggtctcaacggtatctggtgtgcaattacggcagcagaacttctcacgctgatcgtaaccggctctttcctgcttcaggaaaagaaaaagtatcattattaagctttcttattaccaacctttccagaaaaagagtcctgcaccgattccttttcccagtgccagcatcagaataaagactactgcataccggacgatcctggcacgtctcataaagattggaaatacattcaggatttctgcaagtgccatcgaccagcagccgacaaaaatcccggcaaatagtccgaaaaatgccaacagcacggactgtccgggaattccaatccgaaagatctgaaagacatttccaaggattgccccggctgaaaccgcatcctcataaagcaggatgtggtttgcagtatgggtgcggtctgcaaaatccgaaatcaccccgagttctacaataaaagaaaataagcctcctgccacgacaacgcctgcactcatccccagaataccgagaaaaatctgccctgcccacatcattttcctcctccattttccaggtcaatttcattctttcttctcgcagcatcttccaccagcgtcgtctgaatatcattctcatacagacgcatctgtacttccatgggcgtaggatctaccgtaaaccgttttttcccgaaatgattaaagaaaataaggattccaactaccagtccgacggaatacatgatctccaggatcgtaaagccattcgattcttttcctataaccagttcatagatctgtccgaacagtttcgatacatccacatcattgttaaatgccatgattgaaaatgctgatccgcaaaaaataatgactgttaccactgcggttttcagaagatgccagatcattggtggtgtcttctgattttcatatgttacgatcacgtcactctctccaagattctgtatttctactttcggataccgctcatggatgaggtctatgatttttaaaagagagattacaaaacgctgttccttttcttctcggatcctgagaattttcaaaacccggattttggactgcagcagcttatctgcacattcaatttccagaatatctcccagtgtcacatcccgctttgtcacttctacattccggtcacctttcagataaatggtcacagattcagatgccatatccggtcaccccattccacgtttgtactgattgcaattcttctgatcgtaactctcctaagtgcagttttcctgttcccggctctcctgactccatctgctctgcccgaattaaaaatccttcttcatccgattcctttgctgcagtcgtataatataaaagtccgatcaccactgcggccagaaccagtatcagcagacagatccatacttttccatgtccattttccattttgctcaccatacctttccgtctttttctatggtagtattccattgccggtggaaagatatacctggcaactcgtatttctgattttcttattcctgattttcgtatttgctattttcttatttgtgatctacttatctgcgattttctttctccttgattttttcggtctcttctctttttatttttcctctctttctctttttgatttataaccggctcacatctgctttctcatccgctccagtattttcttttccattctcgacacctgaacctgtgaaatccccagaatctcccccactgctgcctgtgtcttttcctgaaaatacctcagatagatcaactgacgttcctccttgtccagtccgtctaaaatctgagacagcatcatccggttcagaagatgttcttccggtctgcttttttcttccagcctgtccagaatgctcagttgcgaatctccctcctgatggatcggcctgtagatcgactctacctccgttgccgcctccattgcctggacaagttcttctttttccgtcccaagcgatgtcgccagttcctccatcgttggttctcttcccatccgctcagtcagttcttcctttttctttccgcattcatacgaaagtttctttaaagaacgactcacttttatcattccgtcatcccttaaaaaacggcggatctctcctgatatcataggtactgcatacgtcgaaaactgaacatcataagaaagatcaaatttatcgatcgcttttaacagtccgatgctcccgatctgaaataaatcttccggctccgcacctctcccataaaatctctttaccacacaccacaccagacctacattttcttttaccagttgttctctcgcttctttatccccatggtgagattttctgatcagagagattgtgtggtccatagttcccgtccttttccgatgatctttttcatcctgacgcacgttcctttttccggttttgattctactttcacctcatccataaatgcttccataaacgcaaatcccatcccggaacgatcttcttccggttttgtcgtatacataggctgcatcgcctcttcaacattcaggattccttttcctttgtctgatacttccataaaaaattgattttccgagatccggcagaaaatacggatctttccctgctgcttttcatatccgtgaatgatggcattggtcactgcctccgaaactgccgtctttacatccgcaacttcctccaccgtcggattcatctgcgtcagaaatgatgcgactgccactctcgcaaatccttcattgcaggatttactgtcaaactgaatctccatttcatttgtgtccctcatacccgttcctcctcgtagatctgcataatttttgtaaccccagataatgtgaggatcttcctgatcctttcatttgtatgtactgcccatacttctcctccgatcagactgatggtcttatatcttcccatgatgactccgattcctgaactgtccataaaatcggttctgtcaaaatcaaaaatcacatatctgatatgatttctgtcgatcaccgcatctgcctctgctttgatctcctctgcattatgatgatctacctctctcggaagatagatcgtcagacaattttcctgcacctgatatttcatacttttcccgctccttattctaatgatgccagggtcaaaagcccccgactttgatgcctacggattgttccgtgctacacactcccacaatcctacccaatattcgcatatcgtgggattatcatcccacttttatgctcatatcggggcgggtcctaaggtctttcacccacctatgagcaagctcatgtgggcttagaccttttgaccctggcatcttctaatttataacaaagaaaaaaaggatatgcttctccgcatatcctcttaagtatctttattttattcacctgtagtgccattctctccggtatttccgtctgctgccgttccacctcccagtgcattcagttgctcctgagcatcatcggcataacggtactctgaatagctgtccagatacatctggtagtatttttttgcattctccgtatcctgcttaccctgatatgcctgtgcgatcaggtagattgccttgccgtcattgtaactggaatccattgtgagaactttggtcagctctgcgattgcatcatcatacgctcctgaatccagcgaattttcagcattggcagtctttctcttgcatgcagccgggaaaatatccccggaaatactgtcgtaaagattctttccattatcactcatggaatctttattgatttccagcagagcatctgccagttccgaactgttcaccgactctgcccggtactgatcgtacacacttaaaagcttttcataacttgcagttgtggcattcgccttgtccactgcagtctgtgcctcttcacctgcggcacgatactgctccagtgtcttcgactgagcactgatctgtgcatccaatgtaccgatctgctcactgtacgcccgcatctgatcattgagcttctctgatctggactggttcactgccggtgcaaccagaaaccagatgattgctgctccgatcactgctccgataaagatattcagaactgccagtcttcccgccagctcccttaccggagaacgcttcggctgaatgatcgtctcattgccaaggctgtattccactgcttcatccttctttttctttttgcgatccacatcttttccatgtcttccacgctgtctcgtgatctcccgcagataattcaacgtcgttgtatttgaaacatccagttttctcgctgtcagaagaagctgccttgcctttgtattctgattcgtctgaatatagatcaatgccagcagttgataagccttcaggaaagtcggatgtgccgcgatcacctgctttaactggatcgtcgccagatcttctccgttctgcttacaatacccgagacattgattatactttttgatcgcctgattaatactctccagttcattcgcagagtcctgaacattccgtatgtaggaatcagctatattgtcacgcggcttcaggttcttactgatgatccactctaccagtgcctctgccacttcccctattccataatataccagtcccagaagatttctcgctgcaatattctccctgttgtactgcaggctctgacgcagggcgatgatcgctccgttcatatctctctcctgagccttcttcagaccatcattataccagtagttggactggtacatgatcttcttagcataatccatttatacccaccattttctatttcttctttttcttcttttccatgacttctttcagaagatcctgcatatctgtcagatcttcctcataaaccgcatcctcgatatcttctacttcgagactcggtttaaactttctgatctcctcttcatagttcagcatctgcctgtaacctcccacatgtctgctgctctttctgtctgttgctgcttccagcttctgcttttcctgctgcccttcagttttttctcctccggctttcgtctgctttttcttttcgcatccgctctaccgtctccttgaccatcccggtcagataaagtgatcccagacaatacacagtcctttttttctgatgccccaggacatattctaaagccttctgcaccgattcaataacgacgaccggacggtctgtatacttttcaaataactttccaagtagctctgcatctgttgcacgctccccgtcaatcagcgtaaccacgtaaaattctgccggaacactgtcacacaaatgtgcgatcatctcttcgtactctttatccttcacagcagaaaacaagaaaatatttccttctgctgtctccggcacactcttcacaaatgcatcaatggcactcacattatgggctccatctacataaaccgacgggaggatctcctccatccgcccctgccacttcacctgtgccagtgcctctctccaacggtccacatgccctttttcccggaacaggtactgcatcacttccatggcaagcagggcatttcccggctgataacttcctatattattcagtttccacgtggtagttccataataagcattcgtgcaggaaaaagcaatatgtttgtcttcgattccaagaatttcgtacgcatctttcccgatttttttacaggaacttccctgctgtgctgccgtcttttcaatgactctgtcactttcttctgcactctgtgcataaaagaccggaacaccgggacggatgatcccggctttctcaccggcaatctgctccacggtatcccccagatattccatgtgatccagtccaatggaagtaatcacacacacttccggatcttctgtggcactggttgcatccagccttccgccaagtcctgtctccaggatcacatactctgcttctgcctgggaaaatgccagcattcccattccaaacagaaattcaaaaaaggtcggatgctccagtccctccgcctccatctgctttaccgccccaagtgtttgtgtaaaaacttcactgaaaacttcgtcactcaccggaacaccatcgatcatgatccgctcattcatctttaccagatgaggggaaatgaacagtcctgtccttttcccctcggaacgcagcattgcatccaggtacgcacatacagagccttttccattcgttcccgccacatggagaatcttcattttcccctgcgggatctgaagaatttcaagaaaccgcttcgtatgggaaaggctgtgcttttttgtaaacttcggaatctccgatatatatctttctatttcctgatatgtcatttcttactttcttcctgatctgacgaccttgatcctgccagcccttttcttctctgatctgctgaccttgatcctgtcagtcctttttctcttcctgatctgtaaacgcctgtcgtccattttctactgaatcatcagtctccactatttctgacagttttccatccttgtattcatacgtttttgaggttctgaagatggtattacttgatcccacctgtgccaccatgatcgtatctccgtctttcaattccgaatctttcaggtccagccgtgtattattcatgaacttggtatcctgcttttcatcattgatatacactttactctgcttcgtaaagtttgccccgtagatactgtaatcgccgttgagctgcgttaccacatccttgatctcggcatccttgactcccatgaccatatgaccttctgtgatcggtgcaccatttttttcataagcatactgctttccatacatgatatcatactgaagcagttccagatctgacagataatgctttgtcttatttctctgctgatggtaattgaagatcgtaccggaatgaatatccaaccggtcaaaaacttctgccatgatctgatatgccgctatatttccatcttttttctgcaatccgatattatcccagatgacatagttcgtattataaagatacttgctctttaaatcctttgcctccagtccaagcgtcggcagatgatctccgtaaaatacgacaactgacggttcattccttgcctccacagcctcgatcaactgggcgacaaatttatccatctcatggacttcattcacataatattcccatgcatttctcttgccttcatcctcaactccggtcactttgatctccggattctccagtgtcggctcagtcggataatctccatgtccctgcacgctgaccgtaaatacgaaatcctgtcccgctgtcgtatccatagactccataatattcggaactaaaatatcatcggtcgcccatcctttcggagtagtcttcagaatattcataaattccttactcgtataatggtcaaagcccatatcattgaatacctttgcacggctgtagaaattgccaccgttattgtgcagtgcctctgcaccatatccaagagatgtcagtgctgtcgccgcactttcgagtacatgggttttcacataggttttatacggatattctccaggtccgaagaatctcatactcattcctgtcaggacttcaaattctgtatttgccgtacctgcccctactgacggtactttaaaatatccactggaatactctttatacagctttcttaaattggggatcgggtcttccgaaaagcgaagccattctacttctgtcggatcaaaataagattctaactggacaaaaataatattcggacgctcttctgacggaagtgaagtctcacttgttgtcaatgctccgtcattactgatctccttcatggtctcctcactgtaacttgacggctgattgatccctgtattgaacagacttgccgcaaaacagtaagggaatccataatcttcataagcaaatgcaatattaccaaaataattggagatcacccgattctcgatcgctacattggtaagtcccatatagcccataattccggctgcaatccctgcaaccgcaagcaggcggtgcatctttccggtatactgtccgccacgtctccacatggaaatgatccagaggatcaccgctacaattcctaccgaaagcattacgatctcgaatgcattaaaatagttgctggtcagttccagggcatctgacaatactttcagatcctgtgcattaaacggcgttaccctttttaaaagcagatagccgttgcacgtaccgaggaacaaccagaatacgctaagtaaaatcctgacaaatacacgccttttaaataagtatacgatcataaatgtcgcaaagatcaaaaatgcattaaacaggaacaccagcggagtccctgtcatataattccatgcctgaaaaagtgagtgtctggaaatcacctcaataaagaaattgatcacgcacgccagcagatactgcagcggcaatgaaagccggttcatccatttatatacaggctgcattttctttgcaaatttgctgttccggcgttcttccaggattttctgacgccgctcttttctcgccttatagtgttccttaatatctttaaacttcagatttctgactttaacagaaagcccttttatatcgggctttctgatatgaatttttttcatacatgacctcacatcagatcttattttccaagaccttccattctttctttcacctgagcaagcatttctgtatatttttccagcttatcccgctcagcctgaaccttgtctgccggtgccttacttacaaatctttcgttcgcaagcatcccctctgctctcttgatctccttattcagtctgtcttcctcttttttcagtctctcaagctcctgctcaaaatcaaccagatcttccagcggaagatatacaactgcatccggtacgacaaccgatactgcattgtccgcaactccctctttcgtctgttcgatgatgatctcatttgcattcatcagtggcttgactgactctgtcattccctcaattccattgcagagtgcctcatcctggcagactacataaacttttgtctttctgctgttcggaacatccatctctgcacgcacgttacggatgccctttgtgatcgctttgatatgctccatcacattctcgtctgccgggaagttccactcctctttatataccggccaactggacatcatcagagactcctcttctggtacaagtgccaggtaaatctcttctgtaataaacggcataaacggatgtaacagcttcaatgcctgtccgagaaccgtcttcagtacccatagaacacagtttgctgcagcctgatcctcttctgcgtgccagatccggtattttgcaagctctacataccagtcacagaactcatcccagataaagtcatagaccttctggaccgcgattccaagctcaaacttatccatattttctgttacatcttttgcaagtgtattgactgcggataaaatccatctgtcagccggtgtcagcagtgcatcttccggtttctcaaccacattttccttcatgttcatcaggataaaacgggatgcattccatactttatttgcaaagtttctgcttgcttctacacgctcgttgtagaaacgcatatcatttcccggtgcatttccggtaatcagtgtcagtctcagtgcatctgctccatactgatcgatgatttccagcggatcgattccatttccaagagatttactcatcttacgtccctgtgaatctcttacaaggccgtggatcaatactgtattgaacggtgcttttcctgtatgtgcatagcctgaaaataccatacggatcacccagaagaaaatgatatcataaccagttacaagtacatctgtcggatagaaataatccaggtcttctgtcttgtccggccagccaagtgtggagaacggccacagtgcggaagagaaccatgtatccagtgtatcctcgtcctgcgtaaaatgtgtgcatccacaatgcgggcatttctccggcatctctcttgccacaacaaattcaccgcactcatcacagtagtaagccggaatccgatgtccccaccagatctgacgggaaatacaccagtccttgatattctcgagccagtgcaaataaatcttgtcaaaacgctccggtacaaaccgcagctctcctgtcttcagtgcattgatcgccggttttgcaagctcatccatcttgacaaaccactgctgtttgatcaatggctctactgttgtaccacaccggtcatgagttcctacagcatgcatatgtggaacaacttttacaaggtatccctgctcatccagatctgccacgatcgcttttcttgtctcatagcgatccattcctgcatattttccacccttttcattgatcgttgcatcatcgttcatgatgttgatctcaggaaggttatgacgctttccaacctcgaaatcgttcggatcatgtgccggagtgatcttaacagcacctgttccaaactctttgtctacataataatcagcaacgatcggaatctcacggtttacaagtggaaggattgccatctttcctacgatatccttatatcgctcatcatccgggtgtacggcgatcgcggtatctcccagcaacgtctccggacgggtcgttgcaatttcaaggaaacggtccgttccggcaatcggatatttgatatgccagaaatgtccgtcctgatcctcatgctccacctcggcatcagacagcgaagtcttacatttcggacaccagttgatgattcttgatcctttataaatataacctttttcataaaggctgataaatacttcttctactgctttggaacatccctcatccatggtgaaacgctctctgtcccagtcacaggaaataccaagcttctttaactgattctcaatcgttcccgcatactcttctttccactgccaggttctctcaaggaatccctcacggcccagttcctttttgtcaattccctcttcttttaactggttcgtaaccttgacctcggtagaaatagccgcatggtctgttcccggaatccacagtgcattgtatccttccattctcttataacggatcaggatatcctgcagtgtattatccagtgcatgacccatgtgcagctttcctgtgatattcggaggcggcatcaccgtcgtaaaaggcttcttacttctatctacttctgcgtgaaaatacttattctcacaccatttttcatacatcttctcttcgatctgcttcggatcgtaagtctttgcaagctccttgctcattctatctctcctttacttttctaattgtctataatataaataacgccctttactaatgtaaagggcgaaaatctcgcggtaccaccttatcttacagacaattttctgtatctcttaagttctttaacggaaaccactccgggacatcctacctgccctgcctctgcattctgaaatcctgaatccaggaacttccacagactttacagcccttcagatatccggttcagaagctaccttccatcatccctctccgaaaccgtctttcagccgggtgatcttctctcccaaccggtctgaccggcagctttgctcctctccccgaacggttctctctgacggcagtaacgatgtactcctcttcctcagcacctttaattctttactaaattgttaaatattttttaactacaaatactatagcggtcatgtgctgatttgtcaagggatttcaggtggtttagagaatcttaagaatgcatctgcttccgctttctaatctttttcttctgtatttcttttaacgaatcagactcttatttcatccattttcttctgaaaaggactcctgccactactgcacctgcaagcagcatcactgctgcagggaatacaacgtttgtcatatctcctgtcttagctgctttatttactgtactattctgattcttgtcggttgtagtgttcttgttatctgacggcttgttatttccggcatttccattattaccattgttgttatttccgccgttattgttattaccgccattgttgtcatttccgccattattgtcgtctttattttcagacttcgttgttacgctgagtgctgctgccgcatactctgttgcatgctcgtctgttccgactgcaacaacctggatctgataagtctctcctgccttcagaccggaaagtgtatatcctactgcatctttggaaatatcggctgcatatacggctccgttgacatagatcttatatcctgcgattccttctgttgatgccggtgcatcccaggtgatcttaatggaatcttttgtcacttcactgctcgctacattttccggtgctgacggtgttgccggctgatccgggtcttctttatccggaagttttgcgatggtctctgtctcttttgtctggcatacagagcaggttctttctttcgatccttcttcagttgtcgtaggttctttgactgttaccaactcaccaaaagtatgtccttttgctgcgatttcctgtgcttcctgtacaactgttccacaatccacgcaaactacttcgcctgtagatcctttttctgtacaggttgcttcttttgcatcaagaacaactgttgtagaatatgtacactcaactgcgtcatcggttacgatcacatagtaaactacgtcaccgatctgtacggatgttgttcctgccgcaactcctgtaaaattgatcgttgtgctggcttctgcggcaggattccggtaaatcgtatttgtaaccttggcaacatgtctgaagtttgaatgatccagtgtcgggttcatcacatagtatgttccgtcaacctctgccgcgatcagatactgtcctccatcttcaatcgctgatgctccggtgatcttctcatatcccttgatcggtgaatcggctgaagctgttgcggactttttaaacagttcaaatgcacatgctgttgtatcaagtgttctctgtctgtcataatgaagtttggatgcatccctccagaaatacaggtaacgtgaagctgatccgtcatacagagataccttgccattagaatttgtaacatcagcaactgtaatattggcttttgctgttttgttcgggattcctactgttcccattgttacaaatgtggttgctccatctgctgtatgtcctgaaattgcataaactccattgctgatcttcttgaatgtatactgacactctgaaagtccccttacattcgtatccccaaatactgcggtacttgttcccggatatgctgcttcctctgtagccgctgctgtctgctttaccagttttgccacatgattatacttctgacttcctgtagtagaaagcagaatatatctgttaccctgtgcatctgcttttgtcacaatcagcacgctgactccggctttcagttctttttcacttgttattttcttaaatccattgattaagtcataatcttccgctgatgtggacggtgtatataactcaaaccagcagttatcatctgccacattctgtctgtcgaaatgaagttttgtcgcatcggtactgtggaaatacaaatactttccaccgccgcctgatgaattatccataatactgaacatcgcatcagaaggatttttttcaaaggtaatattggctgctgttgttacattcggaataccgggagtagaagatgcctttggtccaaggtaaatcccgtttccatttgcagccgtagcttttactttataagtgtagctgtcacttcctgattctaatgtatacatacatttgctcagatctacagttgcaccatcaaacgttgccatcgctgtggcaatctgtgccaccgtcttttcatatgtatcctgtacatccttacctgttacggtaactcccgctactgctgtatcaacagaagatgtatcggcatctgcatagtttccgtcttttactgtcaatgtcctggtctcatctttttcaaggctgaccactttgtacttttctgcatctgtaatcgtcacattcataataaaagattcttcacctgctttaacagttactttcacctgtttcagaccggttacattccccttggatgtcaatgtcagtcttccatctgcataagttgcatccaacactgctctgttagatgaagaaaccgtaatgtcagcatctgcatcaaggcatcttacaacataagaagccgttgcatctgtattgatcacagaagaattaactacagcaccgttatcattttcaacccatacgccactggtcgctgcaccatttacgatatcatcaattgcaattttatcaaactcaagctgctcatcttcatcttcatacaaaagaccgatctgtgcatctgatgtctctgtaatacaggagtatgcataatgcgtaccatcattgactacatacggattatccagccactgaaggcttccgtcatcctgtaccagaccaacccagatacgtcctgaattacgtgctgatgtatcagatggacctgcaaaaagaattgcagtctttccgtttactttctttgaatatgtaatggcacttaactggcaattgttattatacttaaaacctgtctcttttggttctgaccatgtaagtccatcatcctcagatatataataggcattggacatacgcacaaacagatacaatcttccatctgcttctgtaataactgcttcagagctgttgcctgatacagtagctccgcgatgccaggttattccctcatcatcagaatagattgtagatgttctctgaactccacttgtatactgatagcacgggaagatcagtcttcccgtagaagttgtaattcctcgtcccggtccgatcagaaatacctgctcggattcattcttggcatctacaagctgcggtgctgaccatgtggctccgttgtccgttgattttgtaatataaagaaaatccgttggaaactggaagtacggtgtatctccacagaacaggtttgtatctactgctccgtctgcactcttaatgttaaaatgatcatcgatcgtatagtctccgtctacaacttcactggtactgttattcttgatttcataacaggactcagatgtcgcatcggcttttttttccagatgataatcataacttgcagcagcacgtgctgttgaactggaaagaccatttacactggttgtactgagtgcaagaagcagatttccatttgtatcataacctgtacttcctgccttcgccggatatcttgctgcatttgcaactgccagacctgccggcaacaaatcacatgcgaggtagattgtatctccgtcagcaagcaatgcaggatcaataaatgctgttgaatcacgattaaaccggtttccgttatctcccagataattagctaccgtataagaccaggttgctccattatctgtggatcttgatactgccgtatccaatcctgctccgtctccgcaaatatcccatcggatgtctgttgctgcaattaatgctccattacctgcagttaccaaggcaggaatacggaatcttgtaaatcctttggatgaattatgttcctccaaaaacaacgttttcgggaacggctgctccactgttgttccatctgccggctttgttccgtcctttgagttattcgttgctccggctgtcaccggaaagcaccccaaagtaagaacacctgccagcagaaatgataatactttttttctgttcttcatttttctccctcttttctcaaaactttttcatgcttatcaaaatattgagatgccagggtcaaaaggtctaagcccacatgagcttgctcataggtgggtgaaagaccttagaacccgccctgctatgagcataaaagtgggatgataatcccacgatatgcgaatattgggtaggattgtgggagtgcgtagcacggagcaatccgtaggcatcaaagtcgggggcttttgaccccgacatcattttatttcattacaggtcgttcttacggcttcatcctctcccatgccataactgctgcctcctccgatatcgtacaatgcatctcatatagcggaagtctttctgccatctgtttaatcatcgaaagtgtctttaacatcttgtccttttcaccgggacggtaagtctgcttatacagatccggatatccatctattgcagaaatttttctgatcatattttcttctcctcttctcaaaatacagatcccctgcaccggcacttccacgtttgtctgcaatccatgcttcccgcaccacggagttccacatacataaattccatcatcttttatccgaagaatcggtttatcgtcattaaccatcactgccctgccgccgaaatgctgtctccacatccttgtatgcgtggattttcctgttccgcttgcagccgtaaacaagtatgcttttccatccacagcaacagcagagcaatgaaacaggacacaatttctgtccagtattttttcacacaattttctgtaaattgccaatgactcaataattccttttgatgcccccggttcacttttctttttttctctttcaacttcctcgtctgtaacttcaattacaaaatctggtttgccctctgccttcacttcataatcccggcatattatttctgtataattttctgtaaatgcaatttcaatttccgcatctgcaatccgatatctttttcttttttccatcattcaccgttccaaaataccatttttttcaagggtttctgtaaaacttcttatatcttttcgtgctgttgcactgtcaatatcataagcctctgtcaccgcttccaccagtttttcttcctcaatttcttctgacagcttctcccaaagaaatgcacctatctcatttaatttaatcatctccgaaaagtcattttccccgcatttcagagaaattgctactttctgatctcctatttcatctaaaatatatccttctttaattttcattccctgatctcccaatttttcttttagtatataattttttgtttataaaagcaacaaactgaagtgaatcgtcccgtcgcagtataagtgactctttaaaaaaagagagcagtgcatcaggtttcactgccctccctcattttctttatcatttccacgatatcatatccgtaattctttccagtcgcccagcctgttccctgtggattttcctgctgccccagccactgtacatacggagctgccgctttctttacatattcataccgctcatctacacacgcttcattcaatggttccgttgttgcatatgctttcagatgctgaacctgtgccagtattcctgtccgcacatccgcatatgaatttcccggcactccatttccggttgttccgatccctgcgaaattatactgttcaatggatgcatctcctccatattgaagaaaaccggtttctttcattgcctgtacataggcaacttccggtcggactccttctgcagttgcctcttcataataaatctggcaaaatgtctcgatagaatccgcccctcctgctgccagtgctgcagccggataagttcgtcctgatctgttaaaataatcgaccatttcctgtacggatacatcgctttttcccataatgggatattgggcagcagaagcagccactgcaacgctttccatatcagatccactttcatttttcccggtatccccggaatttttctctgtacccgttgtctccgaatctgtattctccgtatttcctttttctttactttcgttctctttccctgaatcagcctgaacctgtatctcctgactcttcacaaccggaatctttcctgactgtcctgctgccagaagcgttatgacaagcagcaatgccattccggcttctatgatccgttctctttttctattttccatatttctgctccactattttcattccctctcacagcttattcatgctatactgagtctatactaaaaaagatcggatggatcttttgtcatacgcctgcaactgaaaactgactactattttatatgatgccagggtcaaaagttctaagcccacatgagcttgctcataggtgggtgaaagaccttaggacccgccccgatatgagcataaaagtgggatgataatcccacgatatgcgaagattgggtaggattgttggagtgcgtagcacggagcaatccgtaggcatcaaagtcgggggcttttgaccctgacatctttatatatgaggtgacaaattattatgaataaaaaatctgtattggtaactggttcttcccgcggtatcggaagagcctgtgcgattgcttttgcaaaagccggatatcatgtatttatcaactgccgtcaaaatatcgcccttcttcattctttacaggatgagattctttcctgtggcggtacctgtacccttcttcccggagatgtcggtgatccgtcccaggtaaaatctatgttctgtcagattgaaaaagaaaccggcggtatcgacattctggtcaataacgccggcattgcctggtttggtctgcttaccgatatgacagacgaagactggtcttctcttcttcagacgaatctttcttccgtcttctattgctgccgtgccgccattccacatatggtctctgtgaaatgtggacggatcatcaacatttcttccatgtggggaactgccggtgcttcctgcgaagctgcctattccgcaaccaaatccggcattcatggtctgacaaaggctcttgccaaagaacttgctcccagtaatatccaggtcaatgccatcgcctgcggtgtcattgatacggaaatgaatgcacggctgaacgaagaagaacgtgccgcccttgcagaggaaatcccttccggcagattttcatccccggaagaagtcgctgaactggttctgctcctttgcagttccccgtcctatatgaccgggcagatcatcggaatggatggcggctttatctgataaagctgtcattcattttcaccgctccggtcatttttacaaaatgtatttcatttaaagtttcccgtaaacatcctgcggaacatacgctttgatctgaatcccttccggcagatactcttctgacagaagctgtcctttgctccggatcatctgtatcttaccggcatctgcaaaaggatacagacgttccacatagatctgatcccgtcggatgatctccagcaatgctgccttcagtttgtccagcccctgtccggtcttagccgatgtggcaatcgagtaatctgcctgaaaatctttatgactttcttctttttccagccgatcctgcttattgaacagtgtgatcaccggttttccttccgctcccatctgacgtaatgtatcatagaccacatacatctgctcgtccatcctcggattcgatacatctacaacgtggataatgatatcggcatattttgcctcttccagtgtacttttaaaagcttctataagatgatgtgggagctttctgataaatccgaccgtgtccgtcagaagaatctcctgcgtaccgtcaagctgcaaagctcttgtcgttgtatccagcgtagaaaaaagcatggcatcttctaaaatccctgcatttgtcaacgcattttcaatactgctttttcctgctgacgtatatcctaccagtgctgccactttcattcctgactgattccgctgactgcggagcaattctctgtgccgctccacatctgccagttcttttttcagacgactgatccgctcccggataagacggcgatccatttccagctttttttctcccggacctcttgtaccgattccgccgcccagtcttgacagtgatcttcccagtcccgacagacgggatgcccggtatctgagctgagccagttctacctggatctttccctctcccgatacagctcttgcggcaaaaatatccaggatcagaagcgttctgtccagtactttgcaatccagttcttcttccagattgccaagctgggtactgctcagttcatcatcacagatgatccctgttgcctcagtttcccacaacagttcttttaattcgatcagttttccacgcccgatataggttgccgggtgtacgcactccctggtctggatcagtctgccagtcacctcagcccctgctgtagccgcaagctctgccagttcatccaatgaccgttctgcagtctcaccgccttctgtatccacgcccaccaggatgacgcgttctctgatatcatccatattatacatctgcattttacctcgtctgcaaaaattctgcttctttcgctactgaatcatcctctggataagccgcctgatattctgacattttttcttttgccatttcccagtctgcggtcttttccagacagatgatctcattatatttcatctcctgaagcaacgtctcctgcttcttatcttcctgcttcttatttccctgcttttcttctgccagtgcgattccctcctggatatactccagggcttttgcataatcctccttgcaaagagctgacgttccggcaagattacacagctctgccgtctttactgtcccattatcaaaagccttttccagcatctccagtgcctgatcatactgcttctgctcatagtatgtcattccaagtccgcaatatccttctgctgcttcttctttatcatcacttcctgctgcctcttcaaaagaagcgatcgcagtatcataatctccctgctctaatgcctctgttccatcttttactgtatttccgcatcctgctatcatgcacattgcactgacagccatcaccaataccattctcttctttttcattttctgctctcccgttaaaattaacaaaaaaccggatacaggaaatgtacctgagcaaatcatcttcccctatccggtttctctccttattcagtttttatttcggcttttataaagcacctgcagtttataatcttttctgctgactttttcagcctttttgatcttcttttttagggtcttctgctgcagactccgctgacatcagcttctgttcttctctgcttccgattacatcccggcagacttcttccagccgttcccgatctgattcttttaaaatgcactcctggattgcttcattcaactgaagcatcttctcatccagctctgaaaccatcttcgcacactctcttaaatcacggcttatgtaatccggtgcatttccctcgaacttataataaatcttatgctccaggcttgcccagaaatccatggcgatcgtacggatctgaatctcgaccttcgtatctaccacactgtctgaaagaaagattggtacggaaaccagcatatgataactcttgtatccgctttctttcggattcttgatataatctttaattgataatactttcaggtcactctgattcccgatcatctctgccagccggtatatatcggaggtaaaagagcagatcagcctgacacctgctatatcattgatatatcggaccatattctcgatcgaggtctcataaccgtaacgctttaatttcttcacgatactttccggtgtcttaattctggtcttgatatgctcaatgggattatactgatgcacatgctgaaattcatcattcaggatctcaagcttggtgccgacttctttcagtgccgcattatataaaaatatcacggtcttccaactgtcaacatcctcatagctcttaactgcagcttcaacctgttgttcacttttcatcgtggacatctcctatttggttgttatttctttctttagtataccatggattcttcacagtgtcacacgattgctgatatcctttatatatttttaaggattttaaagttccagtttcatgtctcccggatgaatccattttttctttctcatcagttctgaaattccaagtgtcacaacagccggaaggacaaactggattgtaatcattttaaccagaacgatcattggatcttctgaagccgtcatgacctgccatgtcatcaaaggccctaccagtccggctgttcccattcctgaacccgtagcattattggtcatatgaagcagcatcgtgctgaccggcccaaggatcgcacttgacaggatcggcggaatccatatctgaggatgccgtatgatattcggcatctgaagcatggacgttccgattccctgtgccacaaagccacccagtttattttcacgataacttgcgactgcaaatccgatcatattacagcagcagccaactgtcgcagctcccgctgccagtcccgacagattcagaatcaccccgattgctgcggaactgatcggcagtgtcagaaagattcccatcagaaccgatactacaatgcccatcagaaacggctgctgttctgttccccagttgatcagtgacccgagccatgccataaattttgaaatcggcggccctgcaaccagtcccactacagatcccgtaccgatacataccaatggggtaagaataatatccagtttcgtctttcctgtcactaaaattccaatttcaatcgcaagataagcagcaatgaacgctcccagcggctctcccggccctgccagcaccagattgccatcgacgatcagttgtcctgccagcagttttgacgcaaatgcaccgatcattccggctactgcagccgaaaccgtcactaactgctgtgcctccagctttctcgccacaccgacaccaattcctgctccggtcaggcctgcagccacttttccgatcatatagatcagattcccataatcaccgcccacaaataagccgatctgctgtatgatcgttcctataatgagcgttgcaaataagccctgtgccataccgctcagaccatcaataaatattctcttcatttcttctctccaattttacttccttttacctatttcagcagaataccccagcctttttcaactgctccgctgcattcctcgccgaactccagcgactgcccctcctgatccagaagttccggcatggcagctgccttttcctgccggtaatctgtcagaagccagcttataacatttacattatccggtcttcctgccaccacttccggcacctgcatggaaacaatctgctccaggaaatcaatatccacctgattctccttacagtaaagcagcagattcttataaatacaaagatatacccccttgcatacgctttcttcaaaatctccgtaaacactctgggctgcctgctcaaagccatttttttctatcagtgacagaattacttttccatatacttcttcctttaaatatgcttctaaagtcttcaaatctgatgcattgcattctctgatcatttctttatccccatttcacttttccgtctgttttctgttaccttatctactataacaaaatccattccctcaggcaacgggatttttcaatcgggatttttttctgtcttattggatttttatcttcaatatgatagaataaccggagataactttctgaaatgtgactgttaagtctgatctttgctgatcttggacttttaaatgaaagaggtagacatatgttccgtttatggggaaaagaatttaaagataaccgaatgttaaaggatctcgtcatttgtgatgaatccgatgatacccgtacgcataaaatttttcatgccctgaatgaaatctgctatgaatttgatctgagtaaacctctgtggcttgattccacgatcaatgaatttaaacgccattcacgtgccagattttatcaggattctttcattgatgaaattgattttgattatcttgaaattcagatcattgaggaataattacggaatcattataagatgttgggggcaaaagcccccaacaatgaggattttaaattttttcatttttttaattttgggtgttgacaattttcaattcatcctatataattaaattcgctgttgaggaacagtgatatgtgcgattagctcagctggatagagcgtctgactacggatcagaaggccgggagttcgaatcttctatcgcacgtcaaaagagattgcagattgcaatctcttttttgttgcccatccagacatcagatgcaatgatacagacataacaagatgtcgggggcaaaagcccccgactcattcatgcgagcaacaaaccaaagtctgtgcctgcttttttattttgcaaacttctctatctgagatgcgatcaatgcctgatcttcaaagtagttgatcttcatggctgcctttacttctttcaaggtctgtgcagcaactgcttctgctttctcacttccggtcttcagaatttcataaactgccggaatatccttctgccactcttttctgcggttacggatcggctctaattcagcctgaagtacattattcaggaaacgcttcactttcatatctcccagtccgccacgctgataatgctcttttaattcatccagattcttatactccggcaaaaattccgggaaatactccggtctgcagaatgcatccagataagtaaatacagtatttccctccagacttcccggatcttcaatacgaatatggttcggatcagtaaacatactgaatacctttttcttgatctcatccggctcttctgaaagatatatacagtttccgagggacttgctcatctttgcctttccgtcaatacccggaagacgcaggcacgcttcattctccgggagcagaatcttcggatctaccagagtctcaccgtacacagaattaaacttatgtacgatctcttttgtctgctccagcatcggcatctgatcttccccgacaggaacggtcgttgccttgaatgctgtgatatctgctgcctggctgatcggataagtaaagaatccaaccggaatgcttgcctcaaaatttctcatctgaatctctgacttgacagttggattccgctgaagtctggatactgtcaccaggttcatataataaaatgaaagttcacataactccggtatctgggactggataaataaagttgactttgcaggatccagaccgcatgcaaggtaatccagggctacctctataatattctgccggatcttttccggattatccgcattatccgtcaacgcctgtgcatctgcgatcataataaatatatcatcaaaatctcccgtattctgaagctctacccgacgcctcaacgatccaacataatgtcccacatggagctttcctgtcggacgatcaccggtaagcataatctttttcatattcttccgtctccttctgattttctcgtattgttcttaattataacactaatattcttccttttctactagatttcttctaaaaagccagggtacattccacaccctggcctgaaaatttatttattctcctgtaatacggcacgcttcatatatcccggcacccgctttttttccggtgcatatacgatctgataaagaacaaatgccatcaccgctgctcctatgacatcaagtactgaatgctgcttcagaaacatcgtcgcaactatgatcagtcccgccagcacatccgctgaaatgcagactgccttatgcgttctcaccttctcactctcatggatcgctatacatgcacataaggaattaaacacatgcaggctcggaaatacattggtacaggtatctgtcctgtagagaaccctcaccgcatccacaaacatattctcccgttcaaataccaccggtctgagatcctgtccgttcgggaaaaaggtacagataatcaggaaaatcgtcatcccggcaaatgagattgctgccagcttataaaagccttgcacatccgtaaagaaaaagtacagaaatacaacagcaataaatgcaaaccacatcagatacggtacgataaagtactcaataaaaggaatccgttcatccagtgccgtctgcatcacatgatactttgtcgtaacatgcttctccaaaaataaaaaccacggcatataaataaacgcatacaaaaatacccacatatgcttatactttttaaaaaatgcccctgcctttgctctccacttcatacacgacactccctctgccatccgcgtggacttccgaacaaaccactctgtcccaactgctcttttctgaatcctttctttgtaacacgcccgattatagcacgatttattttaaacctcaaccaacttcataagtttttaacatttctttcagaaatcttaggttttatccacatccgattaccgacttattcctctgcttctaatttaatgatgccagggtcaaaaggtctaagcccacatgagcttgctcataggttggtgaaagaccttaggacccgccccgatatgagcataaaagtgggatgataatcccacgatatgcgaatattgggtaggattgtgggagtgtgtagcacggagcaatccgcaggcatcaaagtcgggggtttttgcccccgacatcatttaattcaaaaatatacatatcaaaagatctttttgctgccctcagatctttctcaccgtgcagtgtccacgctgccaccggtgcatgaaacagctttttatttaccaaaaagcccggatttttccggtctgcccatttataagaaataaaatccggtctgcatatacagttgctcagtaaatattttacgcagaatcttaatgcataatgcgttgtatccggcttcctggtaagattttcagaaagctgtccgcggggaatctcatttctgtgctttttcatccaccgcagcaccagactgttaaaagactggaccatatatttccctctgtatccctgcagttcttcatccagcctccggcagacttctgtatctgcactcgggagctttacttctatcagaagaggaacttttccatcaaccagccgaagaacttctgaaagaagcgggatcttttccccggttctgcttaaccggtaagttctcatacgggcataatccgtctcttccacttttcctttttctccgcatattcttctgaaatcatcatcatgaaagacaaccagctttccatcttttgtaagatgcacatccagctcaatcccatagccggcttctatcgccgcctgaaacgccgggatcgaattttccgggattcccttttttatgtcatgcagcccccgatgagcccatttcactccaaaaaacggatgtaccctgcgtctccccgacaatctcggtgcgagcaaatacagcagaattacatttcccaaaagtaaaaccaacagaacgatcaagatccctttcatcataaccaccattactccttattctgtaatgaatcttattttttcttccatcaaccgtactttcatttcatttcttaaaaagattggctcaccgtctgtatgtatcggcagtgtactgcctgtagaaacttctgcactgcgacattgaaggatcgtaacgccacggaactttgtatgctttccaaagaatgccgtcggcaacagacacagaatcttctttttggagagatctgctgccaccatgatatccagctttccgtcagacggagatgcctccgggcagaatttaaatccgccaccttcatatttctgattcataaatgccgcaaaatatgcacgttcaaaccgatgcacacttccgtcatccagccggatctccatcctcaccggctgatccttcagcagccggttgagtgcaaccactgcataactcagctttccaagctttaagcggtttaagatcttcttccattttgagatgcacacttcatggcacactgccgcatcaaatcccatccccgcactgaccaggaatcgtcttcttttcccaccaagtaccagctctcccacatccagtttctcaatcttttccgagttcaggatcaactccagtgccttttttgcatctttcgggatccccatgcctcttgcaaaatcattactcgatccggtaggaatatatccaagcgttactttagacggatttttaattccattgatcacttcattcagtgaaccatccccgccaagcacaatcatcgtatgctcttcctcatctgctgtgatctcagttgcgatcctttccgcatctttttttctgccggtcattctgacttcataggagacccgcctttttttcagttccggctcaagctgactccacagcagctctccctgtcctgttcttgattttggatttacaataaaaatgtagtccatcaatttttctccacttcgcacaatgtactttccagatattttccaagcgaacggctcatatttccttcaaaatcagcttctccgtttctcaggcaccactcaaatacatttccgatcacgatcattctgatatcggtcgtaaactcttcaatgctgacattcagctttaccactcctgcttcgatcgccttctccacatacgtctgcactgtcacgatcggatagggacgctctgttctgattgctgcattcaatgcctggttcttcgtatcgtaataccccgacataaattccacgcccagttcccggcaatacttcacataattcatgtagacctgaatgattccctgctctacaccacctgcattctccgggatttccagcagatccgggttgatcgtcggctgttcctcaatatagtaagacagcagatcatcttttgtcttgaaatgatgataaaagctgccattggaaactccggcctcctcacagatatttttaatagaaagttcttcatacccttttttctgaaggattttctttgctgcctgaaagatcttttctctcgtttcctgcgatttacgctgctgcctggaaagttctactttttcactcattaaaatttacactcctgtatgaattaaaaagaaattccagtttacgactatcctcaacttctactttgaatttcttcttatgatgcactcagtatagcacaaataccgattggtttcaagaaaaccgagtatactctgtattctacatgcaaactgtccttacctattgcttttacacactgcacccaggtatttctcctgcaagcctttataactgatatgctgcaaatgcagatggcatcggatacttcttttccagctcttctttttctgcaaatatcacctgctcactccatatcttctgatccagttctctttccagctcatccacgatcacttcgtatcctttcatctgccattctacatgactgaaaatatgctttgcatccgggagctttttcacccgcaccggagtcagtcccagtgacctggcatattcgatcacttccttctgcttcagatgtccttctacatttggaaattcatataagccggcaagcagacctgtatccggtcttttccggattgccacttcttcattatcacagaatctcaggatcgtctttttttcaactcttctttcttttgcttttttctttaccggatactccagttcacatccatcccggtgtgcaaggcataaatgactgaccggacagatctcacacttcggttctcctcccggcagacatacgattgcccccagttcgatcagtccctgattaaaatctcccggtgattcctttgggatcacctcttccagtaaactttccacttttttccttgttgatgctttcagaatatcatccgcatcttccagaatccgggacacaacccggaatacatttccatctactgcaggcttttgcagatcatagacaaaagagccgatcgctcctgccgtataattgccaatccctttcagttcccggattttctcataagtttcaggaaattttccgccatactgttccatgatctgttgtgcagcaagcttcagatttcttgcccggttataatatcccagcccttcccagagcttgagcagcttatcctcttccacatttgccagtgtttctatatctggcagttctgaaaggaatctttcataataaggctttactgcctccaccctggtctgctgaagcatgatctccgagatccacacccggtacgcattgatattttttctccacggcagatctctgcggtttttcctgtaccattccacgatcagcggtaccgtttctttcatttgcggactctccagcactacatccaccggatcacagatcctgatctcatctttactgacttcacagtcgtacgccaagatcttcacaccggccgcctttgctcttttcaatgcctctgcaaactccggctgtgtcttttgatttggagtaaaataacgcacttccttcatctggatcacgaaaaagaggattgcctcatagccttctttttttgctttgatcagttcttctatatgcctgacggctctctcactcggtgcatccgggaacagacagactccgtcttcttccagtgtcacccctttcacttctataaaagcttttttcccatccccctctgcataaagatctaatcttgaatctccataggttatctccggacggatacactggatttctttgaacagattgccggtttgcagccattcttccacgcacctgttcggaatctgtgaatccagattgaccagcctttctccttttttcaccgcgatcagatcccacagggtggcacgcttttcattttcacttttctgcaaatatacttctgccccgggaatcagcagttcttcacaccggcctgtatttttcacatgaactttttctctttttccttccagctccacataagcaacaaaccggttttcccgctcaagaaagacagctttttctatccgttcgtatttcattttattctcctcttattgaaaaagatcctttgaattttttcgtatgcccggcagctcaaaactttggcactttccatgatatgtctggcaacaaaaaatatctgctccgtattatatcacagaacagatattttatcattttctataaaatgctgtcggggtcaaaagcccccgactttgatgcctacggattgctccgtgctacgcactcccacaatcctacccaatcttcgcatatcgtgggattatcatcctacttttatgctcatatcggggcgggtcaaaaggtctttcacccacctatgagcaagctcatgtgggcttagaccttttgaccctggcatcataaaatttttgaaagaaattccttcagtcgtgcatcctttggatgttcaaaaaactcctgcggaccggcttcttctttgatctgaccgtcatccatgaaaaggaccctcgatgccacttctctcgcaaaccccatctcatgggttacaaccaccatcgtcatgccttcctgtgccagctctttcatcagttccagaacttctccgaccatctccggatcaagtgctgaagtcggctcgtcaaaaaggatcacatccggattcatcgcaagagagcggatgatcgcaactctctgcttctgaccgcctgataaagtggacggatagacatctgccttatcctccagtccgatcctggtaagaagcttcaaggcattttccctgacttcttttttgatctgttcctttgtcgtagtgatcggaacaagagcttctttcttatcttttcctctgaaaacatttttgaactgaatcctgcggttcgctctttttgctttcttcagatccctgcactgcagatattccggtgccatcatcacattctgcagaaccgtcttattgttaaaaagattgaaatgctggaataccattcccatatggcggcgatgaacattaatatctactttcatatctgcaatatcaacaccgttaaaaatgatacttccgcctgtcggatcttccatacagtttaagcaccgcaggaaagtactcttaccggagccggatggtccgagtacagcaacgatatcacctttgttgatcgtgacattaattcccttcaggatctctttgtccccgaagctttttctaagattaattacgtctatcactcttcttcaggctcctttccaagatttttacaagcagcgttatgatcagtacaagtgcgatatagatcaatgccatcacaagataaggtaccataaattcataactgttacttccgatataattaaacgcaacataaagatctgctgctccgacgaaactgacaacagaagtctcttttacaagcgaaataaactcatttccaagtgtcggaagaatattcttgacagcctgtggaatcacgatctttgtcatacttgtcccaaagctcagacccacggcacgtcctgcctccatctgtcccggatctactgactgaataccacttcgcatgatctctgaaatataagctccgctgttcagaccaaatacaaccattgcgacctgcacaccggtaatttttactccaatgatcggaagcaatacataataaaataccagtagctgtactaccataggtgttcctctgaagagtgccacataaaaactgcagatatgattcagcacctttggcagtgtcttgtatttcgggatcacccttactgttgcgatcagagttccgatcacaataccgataatgagaccgcagattgcgatcatcaatgtattctgcaaaccctgcagtacttttacatagccgttctgatccagaaaaatttctataaatttatctactttctgactgaaattgcccataagtttcctttcttaaaaaaggaaaatgccgcagcatacgttgcctgcatttccctttctcttctctttccttcaacagtactgcactgtggcagatcactgtcccgtttccctgatcctactgaacctcgttgattgctgttgtgattgcagatgcaggagcggcatcaatgataacataattgatatttccattgagcatatcctgtactgccagagaaccactcttataagttacgcattttgccggaagtcccgggaaatcccattcttcgcttccttcaacataatactgtcctgttgttccctgctgaacaccgatcttatcagactctttcagttctgcaagtttcgctgccacatcatctgcactcttgcagtcatcgaatgctgtatcgttgcttggtacgatcagacgctgggatgctgaatagtaagaatctgtaaaggttacatacttttctctctcttcattgatcgtcagacctgccattgcaatatcacacttctgctggcttacagacagacatactgcatcaaaatccatattctcgattacaagttcttttccaagcttctctgcaagaagggatgcgatctccatatcgattccataataatcttcaccctttgtatactcgaaaggctcaaatgctgcatttgttgcaacaacgagctgatcctttgtggtatcaagctttgctgactttactgcctccggctctccatctgagaaatacttattgcagatctcatccagtgtaccgtcctctttgattgatgcaataaaatcattcacttcgtcaagaagttccggctgctctttatcaacaccaaatgcatactcttcattcgtaaggtcgatatcgattacttttgcagtcactttttcattgtttccaccgcatccaaccagcatactggcggcaagtgctgctgacagacatactgctaaaaattttttcatgtctctttcctcctgatttatccattatttttctgcataaacatacagattatcttaataattttaacatacttttcacataatgcaagtaaatcgccctacattttctgttctctgatctacttttatgtattacagtaatgctgaaattccaaagtaaaggaatacgatgattccaagtacgatccggtaatatccaaatactttgaaatcattgtttctgatatacttcatcaggaacttgattgcaataatcgatactccaaacgatacaagcattccaagcagcaataaaaacacctgcattggtgtaaatgcgagtccaaacttgaataacttcaatgcacttgcaccgaacataaccggaattgcaaggaagaatgtaaattctgctgctactccacgggatactcccagtgccaaagcacctacgatcgttgctcctgaccgggatgttccggggatcatcgccatcatctggaagactccgatcagaagaactgtcggaacagacaactgggacagcttcgtcaccctcggttctctttttgcattaatattctctatgacaatgaataaaataccatacaggatcagcataaatgcaaccacatacgcattgctcatctttgcctctatccagtcattcaataacagtcccacgatcattgccgggagcgttccgataatcactttgatccacaactggatcgtcatcatcttttgcttctgcgtcttcgttggtgaaaatggattcagcttatggaaataaatcaccactactgccatgatcgatccaaactggatcactacattgaacatatttttgaatgcatcattctgctggagcttaatcagttcttccaccaggatcagatgcccggtactgctgatcgggagccactccgtgattccctgcacaataccaagaataattacttttaatgcctctaacatacttctcctccttctagtacaaaccgttcgattgccttcgctactccatcttcttcattacttcctgtaatataatctgccgttgcctttactttctcttcggcattcgccatcgccactccaaaaccggcttccctcagcatcggctcatcattatcgccatcaccaaacgccatgatctcttctctttcaatcccgagcctcttccccagttccaccagaccgcttcccttgttcactccggctgcatttacttctatattatattttaatgaaccgacaatctccacttcttccagtgtctccagttctttccatgcccttgcccgttcatccagatcagcgaacaacgcctgcactttatccagactgcgggattcccgatcgaccagaccaaaaatatcctctgtcggaatacgggttgttcttatatattcccacatattcggattatgatgataccgttccacatgaagcatcttttctgcctccgcatatccctgaccatcaaaatatacctcttgtagggtatcatatttcgcacagatttccaatatctttttcgccttatcccgactcagaagctgctccataagaacgctcccatcctgcgtacggacaatccttgctccattcgatgtcagtgcataatccattcccggaaaacttttcaggaactccggcactcccatccacgggcgtcctgttgcaacaagaactgtaacgccctgacggattgcctcttccatcacctgccttgtataaggtgtcagctcctttttatcattcaataatgtaccatccagatcaagtccgatcatcttaatcttttgcatgcttttctgctcctcctgatttactataattgatgttggggtcaaaatcccccaacaatgatgcctacggattgctccgtgctacgcactcccacaatcctacatcttataattctatttattacgaaacttttaaatatattaagtatatcttgtaaattatttctaaaataattctaacagagtttgccttataacgcaatttattgtataataggtactcgacaaattaaatgatgccagggtcaaaaggtctaagcccacatgagcttgctcataggtgggtgaaagaccttagaacccgccccgatatgagcataaaagtgggatgataatcccacgatatgcgaatattgggtaggattgtgggagttcgtagcacggagcaatccgtaggcatcaaagtcgggggcttttgcccccgacatcattaaatgtcgttatatagaaaggattcgagattatggaaatctacaaaaatcgcaggatgcttacgggagctgctctcctttgcacctttgcattaactctttctgttcttccggttcatgccacagacagtattgagagtctggaaagccaaacctccgcccttgaaaatgaacttgcagggatcaaccaggatattctggatttgagcaaccagatttctgatactgagatgcagattgagatcctcaacagcagtatagacaagacgcaggacgatctgcttgatgccgaggaaaaagagaataagcagtatgaagatatgaagacccgtatcaaatatatgtatgagaacgggaatgcatcacttctggagatgcttttttcagccaaaaatatgactgactttctgaacaaagctgattttattgaaaatctcagtgattacgaccgtcaggctctgacccagcttcaggatatccaccaggagatcgcagatcagaaggaagatctggaaaaccagcaggcttccatgcagtctctgagtgaacagttaaaatccaagcagacagagcttcaggcaaaagcagtggctacttctaccgacctggacactgtcaatgccaaactgaaaaaggcaaaagaggaagaggcagcacgtctcgctgaagaagcacgccagagagctgctgcagaggcagcagctaaaaaggacaatgccggacaggtagacggtaccggcggcggtacgattacgaccggtggtacgacggtttctgcggatgatcttactttacttgcagcgattatccaatgtgaggctcattataattatgaatccatgctcgcagttgcaaccgtgatcatgaaccgtgtggaaagcagtcgtttcccgaacagtatttccggtgttgtctatgcaaacggacagtttgcaccggtatggacaggcagcctgaagcgtgtactttcccagggccctggcactctttccagacaggttgcccaggatgccatcaatggttcaagactggcagccgtatcggattgttactttttcctttacgcaccatctaccagcagatccggtgtcgttattggtgacaatgtcttctttacaagctggtaataaataaaagaaccggaattagtcccgactcccaatcgttagacctcaggtctgactttcaggagcggttcaaatcccggttcttttttagaaggataaaatgtaatgacaaaaataattctatttcaatcatctgatctcagtaatctcagtgatctctgctttctgagctgacctttctggtccaatctcaacaatctgattctactgataatctataacgtcgatccatttcataaggaaatctttttccagttcattatcttttgaaagctgtgctgccgctacgattgggagccactgctgtacatactgctttgctgtatcactcttcttgcagaatgtattaagatacagatctgcaacttcctgatctttcaatgcaaataagagataagtcatcgctgcatctgcacttgcatttccctgtgtagcatgtgcccagtcaacaactgtcatctttccattctttcctacgattacgttactcggattgaaatcaccgtggcagatcttattatgcttcggcatactctcaagacgtgtcatcagttcataacgggttgtagcatccaggtctttcagtccgttaatctgacgtgccagtttatctttcatgcctttcagcaacggagagtgcttgctctgtacttcgagctgcaatgctacgaaatcatccatatattttgcaagattcttcttatcggattccatcatttcttccagtgtcttgccttctttatattcaatcacgattgcccatttaccatcgatctgggatacttcttttacctttggaatatccagtcctgcctcttccacacgtgctgtattcaatgcctcattaaatacatctgactttggatgagtctctgcaaatacttttacgatactgtcgtcacacttatatactgtcttatatggacgctttacgatgatatttttttcttctaatttcatgatgtagccctccttgttgttcgtcagctttttgctgctttccttttgatgaccacattataacctataaatttttaaaatgtaaccccttcagaacaactttgtgcagtttttaacgatttttttcttctcttttatattgttatttttttaacatatcgttattattgttttaactttatacaaactgcagacatattggatttttcttattactgccaaaagagccactgtatcttttttgtatagccaataacaaaaacaacggtatatcttgcattttctgctggatataccgttgcgggatttaattcattctattcaattctgacagttcttttggaatgtcctaatgacgtctgacgtcatcttattttccatagtagcacttcagatacagatctttaatctcctgaatgagtgggtatcttgggttagcacctgtacactgatcgttgaatgcctgctctgacatctcatccagtgtatcaaggaagtacttctcatcaataccgtaatctttgattgtcttcttgattccgatgatttctttaagttcttcaagttttgcgatgaagttctcaaatacttctttatcatctttacctgtgcatcctgcgaaacgtccgagttctgcgtatcttgcaagtgcatgtgggtactgatactgtgagaatgttcccatctttgtcggaacttctgctgcgttgtatctcataacctctgtcaggattactgcgttagcaacaccgtgtggcaggtggtggaaagcaccaagcttatgagccatagagtggttaacaccaaggaatgcatttgcgaatgccataccagccatacaggaagcgtttgccatttcttcacgagccttcggatcgtttgctccgttctcgtatgcagatggaaggttctcgaatacaagcttaacagccttcatagcaagaccatctgtgtaatctgtagccataatagatacatatgcctcgattgcatgtgtcataacgtcgatacctgaagcacttgtcagtcctttcggctgtgtcatcatgttgtctacgtctacgattgccatgtttggaagcagagcgtagtcagcgattggccatttaacacctgtgtcagcgtctgtgatgattgcgaatggtgttacctcagaacctgttcctgaagatgttgggatagctacgaagtaagctttctctcccatcttagggaatgtaaatactctcttacggatgtccatgaagtccatagccatatcttcaaagtttgcttctggatgctcatacatgatccacatgatcttaccagcgtccattgcagatccaccaccaagagcgatgattgtatctggctcgaactgtctcatctgatcaacacccttacgagcacactgaagtgtcgggtctggagcaacctcaaagaagcatgtatgctggattcccatctcgtccagtttcttttcgatcggagctacatatccattcttgtacaggaaagagtctgttacgatgaatgctttcttcttgtgcattactgtaccaagttcatccagtgcaaccggcatagaacctttcttaaagtataccttttcaggtgttctgaaccacagcatattctctctcctctcagctactgtcttgatattaagaagatgtttcactcctacgttctcggaaactgagtttccaccccaagaaccgcatccaagtgtcagagacggagccatcttgaagttgtaaagatctccgattccaccgtgagaagaaggtgtattgatcagaacacggcaagtcttcattgctgctgcatgcttagcgatcttctctgtctcagccggatgaacataaagagatgatgtatgtccgtatccaccgtctgctacaagctgagctgctttctcaagtgcctcatcaaatgtcttagctttatacataccaagtaccggagataatttttcatgtgcaaactcttctgagatatctacagactcaacttcaccgataaggatctttgtctccttcggaacatctacgccagccatcttagcgatctcgtaagctgactttccagggatcttgctgttcaatgcaccgttgatgatgattgtcttccgaactttgtcaagctcctcacctggtttcaggaagtagcatcctctgtactggaattctttcttagcttcctcatatacgctttcaagaacagttacggactgctctgaagcacagatcataccattatcaaatgtcttagaatgaatgatagagtttactgccattcttacatctgctgtatcgtcgatgataaccggtgtattaccagctccaactccgagtgccggttttcctgaagagtaagctgctttaaccattccaggaccacctgttgcaaggatgatatcagcatctctcattactgtatttgtcagttccagtgacggagcatcgatccatccgatgattccttccggagctccggctttcactgctgcatccagaacaaccttagctgctgcaattgtagatgcctttgcagccggatgtgggctgatgatgattgcatttcttgtctttaagcagatcagagtcttaaagattgctgttgatgtcgggtttgttgtcgggataactgctgcaacaagtccgattggctctgcgatcttcttaattccgtatgccttatcttcctcgatcacaccacatgtctttgtatctttatatgcattgtagatgtactctgctgcgtaatgatttttgatgaccttatcctcgagaatacctctctgagtctcttctactgcctgtcttgcaagcgggatacgtgccttgttggcagccatagcagcttcgtagaagatcttatctacctgctcctgagtaaaagtagcgaatactttctgtgcctcacgcatctctttcattttcgcctcaagggcctctacattgtcaatgaatccggtattaactgtcttctctacagtctttgcggtttctttcttagccattagattattcctcctgtacttgaatgaatcatttcctatcaggtcattcctgatcacagatattagtataactcgttcgttaataaattgtcaatgtcgcttttgttaataatttaacacatttttttggtgtttttttgtgcattttcaccaaatccatgctttttttcaaatatatgctaaaaatcctctgcaggattatctcatcctacagaggatcatagaattttaaatatctaatatagattatacaagctcaatcagaacttccatagctgcgtcacctttacgctgaccaatctttacgattcttgtataaccaccgttacggtctgcatacttcggtgcgatctcatcaaagagctttgcaaccatatctacttctttcatgttcttcttctcgccttctttaaccgggaagagaactttgagcatctgacgtcttgcgtgcagtctgcttggcttatctttcttaattgtcttttctacttcatcgtatacagtaactttctttccgtcaacgacttcttttacacgcttgccatcagcatctttacgtgcaactttagcctttactgtaacttcttcgtagttatctttttcttttacagcgagagcgatcaggctttctacctgcttacggatctcttttgccttagcttctgtagtaacgatctttccgttgctaagaagtgctgttacctggtttctcagtaaagcttttctctggctggctgttctgccgagctttctatactttgccattttttattcctccattcattcacatttggttatgcatcttcgggcttattaatcaaatgctcctgccgaactcttcgggcttaccgacaggatattcaatcactgccgaacatctcaaacgatgcttcggtttcttctgtctttgcgacaggatcttactcttcactatggttcagttcaagattaagttctttcagcttagcaagtacttcctcaagggatttacgtccgagattacgaactttcatcatatcttcaggagtcttatttgtaagttcttcaacggtattgataccggctctcttcagacagttataagaacgaactgaaagttcaagctcatcaatgctcatctcaagaaccttttctttttcatcatcttctttttcgatcataacttctgcctgctgtgcaacttcagaaagatcgataaagagcttcaggtgctcacttaaaacttttgcggcaaggctgactgcttcatcaggagccattgtaccttttgtccacacatccaatgtcagcttgtcataatctgtgatctgaccaacacgggtattctgtactgtcagatttacacgatcgatcggagtgtaaatagaatcaatcggaagtacaccgatcggcatatcttctgtcttattcttatctgaacttacatatcctcttccttttgtaatcgtgagttccatatagagcttgctgtccttgccaccgcttaatgtagcaattacctgctccggatttacgatctcaatatcggaatcagcctggatatcagcaccggttacaacaccttctccttcgtattcgatataagctgtctttacttcatcagactcagaagtgttcttgattgccagggatttcaggttcatgataatctctgtcacatcttctttaacacccgggatggaactgaactcgtgcagtacaccgtcgatttttactgaactgatcgctgctcccggaagagaagaaagcataattcttctcagggaatttcccagcgtagttccgtatcctctctccagcggttctacgacaaatcttccgtatttcttgtcatctgaaacatctgtaatttcaatattaggtttattaaaatcaaacactacacagaccctccttatgggcttaatctacgttgagggggtacaaaactgtatctatgatacttcggatcagtctgcagatcttttgcagatgatccgaatttgtgattctattatttagaatacagctcgacgattaacatctcatcaactggaacatcgatggcttctcttgccggaagctcttttactgtacctttcagattctcagcgtctgcttcaagccactccggaaccatatttcctgctgtagcttcaagaatctctttgtatctctgtgagccttttttattctctttgatctcgattgtatctccggcttttacaaggtaagatgggatatttacctgcttgccgtttacgagtacatgcttgtgatcaacgatctgtcttgcttcttttcttgttcttgcaagtccaagacggaatactacgttgtccagtcttgactcaagaatgatcatcaggttcgcacctgtcataccttccatctgcttagcttttgcatagtagtttctgaaaggtttctcaagcacaccatagatgaatttagctttctgcttctcgcgaagctgaagaccatactcgctcatctttctgtttgctctttttaactgtctgttagatttcttattgattccgagataaatcggatccattcctaatgaacggcatcttttaagaacaggaactctatttactgccatttctatcctcctaatttatatacacgtcagcggtacgctccgctgcatcaacatttgctatattgcttttcttacgtagcagaattctaattagactcttctacgcttcggtggacggcatccgttgtgcggtaccggagttacgtctttgatacttactacatcgattccgcatgcctgaagtgcacggattgctgcttctcttcctgatcctggtccttttacaaatacatctactgatttaagaccatgtactaatgctgcctttgctgctgtctcagccgccatctgtgctgcatatggagtagattttcttgaacctctaaatcccagaccgcctgcacttgcccatgaaagagcatttccctgagtatccgtcagtgtaacaattgtattgttaaaggatgactggatatgtgcctgtccgcgttcaacgtttttcttgacacgcttttttgttacttttttcgcaactttcttagccatttaaactaacctactttcttctattttatacgtttaattatttcttcttatttgctacagttctcttaggacctttgcaagttcttgcattagtctttgtcttctgaccacgtaccggaagtccttttctgtgacggattccacggtagcatccgatttctttcagtctcttgatgttcagctggatctctcttctgaggtctccttctactacctgagtctcatcaattactgcactgatcttctttacttcttcacttgtaagatctcttacacgggtatcaggatttactcctgcatcctttaagatacgatctgcacttgttctaccaattccgtagatataagtaagaccgatttctacacgtttgtctcttggtaagtctacacctgcaatacgagccatgtgtctttcctccattttcttttctggttttcttgttcattgtccctaactgaggctgtgaatgcgaatcagatatcttctatataatatagaaagaatggtgtcatctgttcatgctgcatcctaccggaatgtatcgttccaatatcccagcccaggcatgtacggaaactacataccctttcccggcacggatcatactttcatccgccaatgcaaatgccgggtattataagcaatatacaatagcatacaactcttgtcctttaccggacagcaaacgttcgagtgatgcccagaccacacgctctgtcggtacctgcgaacagcagcggtgtatcctcactgtatattaaacagtcccacgcctcctggcgtgtccgactgtcagccgctttaacttgcacaaaacatcagttagccctgacgctgcttgtgcttcgggttctcacagattactctgatactaccttttcttttaatgattttgcatttttcacaaattggttttactgatgatctaaccttcatgttaaatcctccttccctattttgctctgcctatatatattctggtatttttgggcacacctatccaaaaatgaccatttcatattgtatcaccaacacttatgtaaagtcaagcatcttttttcaactttctcaaaactttttcagctttctcaaaatcttttttgatcttctaaaaaagacctctgaaaaattccaggttttaccctttctatctttcagaggtcttctgcttattgaactgatcttcttattaagaagcagtgttgtttatttatctctccagacaattcttcccttgctcagatcatatggcgacatctctaaggtcaccttatctcccggcagaatcttgatgaaattcatacgcagctttccgctaatatgtgccagcacaatgtggccgttctccagttctactttgaacatcgcgttaggaagtttttcaactacaactccttcaatttcaatcacgtcagtttttgacatttttaatcctcctgcataaactcctgatggcctcatctgccgatatatcttctgcatattcagataatatcggttgaagatgtcttacattcttttttttcatctgatttaaaggttttaaatcaccatcagacagatataaataattcttttcgacacggataatgacatatacatggtctttatcgtgtccggcttttgatcttacgatcattccgggtttgtaattcatgattattctcccagaatcttaacgatctcagcaaatacatcattgatatcgattgttccgtcaacctcttttaatattccggcttctgtataataatcgatcaatggctgagtctgctcatgatatacacccagtcttttcagaactgtctccggcttatcatcatctctgaggatgagtccgccaccacatttgtcacaaattccttctttggaagttggtgcatacgcaatatggtatgttgctccacagtcaacgcatgctcttcttccggacatacggttgacaatattttcatccggtacttctacattgattgcataatcaatcttctgtcccagttccttaagtgctttatcaagtgcctctgcctgcgggatcgtacgcggaaatccatccagcacgtatccattcacacagtcatcctgatttactctgtccacaaccaggtcaacaaccagttcatctggtacaaggagtccctgatccatataagtctttgccttctgaccaagttctgttccgttcttgatgttggctctgaaaatatctcctgtagaaatatgaggaatactgtatttttctgcaattttctttgcctgagttccttttccggctcccggagctcccaacatgatgatcttcatagtctcatcctcctttatataactttaactcgcttcgttctgtcctctttcaaggacagaatcggggcgagctaaatgtcttctaatatccaaggtagctgttcttcatattgcttcccttattatttaaaaatcctgtgtaatttcttacaagcatctgtgattcaatcttcttgattgtctcaaggacaactcctacgatgatgatcagggatgttcctccaaaggaaacattcgcaccgaatacaccgttaaagaagtatgggatcacctgaacgatgatcagaccgcatgctccgataaagatgatatagttcagaatctttgtcagataatctacagtcggttttccaggacggattcctgggataaatccaccgctctttttcatattatttgcaatctccatcggattaaatgtaatcgatgtgtagaaatatgcaaagaatattgtaagtaaaatgtaaaccacgagtccgatcgaataaatcggattctcaggatcacaccagttatttgagttcagacctgcaaggatcttgcttccgatacctgttccatttccctttccaaggaactgagcgataacgatcggagtctgcatcaatgaagatgaaaagataaccgggataacgccggctgtattcactttaagagggatatgacttgactgaccgccatatgtctttcttccctgaactttcttggaatactgtaccgcaattcttctctcaccatcctgaagaatgataacaaatacgattactaccagtaagatagcaagaataataattccggcaagtcctgccttggcaagcttctttccactcatgaactgtgtatacaatgttacaaggtcatccggtacacgggaaatgatattgataagaagaacgattgagataccgtttccaacacccttctccgtaatacgctcaccgatccacatcaggaatgcacttcctgcagtcagtgtacacacaacgattgcacagtttacgaaattataatcaacgagaagtccctgacgtccgaatccgatcgacatagcgatagactcgatcaaagcaagtccgactgtcacatatcttgtgattgcagcaatcttctttcttccgtcttctccatctttctgcatttcctcaagcttcggaattgcaatcgtcagcagctgcataatgatggatgatgtgatatacggtgtaatactcagagcaaacaccgacattcttgtgaaggatccccccgtaaatgcctcaaagaaattgaacgcatcaccggtctgctgtgcaaagaaattctggataaaggttggatcaactcccggtgtcgggagctgagatccaaatcttacaactacgagcataagcagtgtatacagtaatcttttccttatatcctcaaccttaaacgcattacgcacggttttaagcattagatcacctctgcttttccaccaagagcttcaatcttctcagcagcttttgcactgaatgcattagcctgaactgtaagcttcttagttaactctccatttccaagaattttaacgccatctctcggatttttaacgataccggcctcgatcagtgtgtcaactgatactgtagctccatcttcaaatctctcaagtacgtctaaattgattcctacgattgtcttagagtttctgcatgtgaaacctctcttaggaattcttctgtataaaggcatctgaccgccttcgaaaccaggtcttgtagctcctgaacgagccttctgtcctttatggccctttccggctgtctttccgtttcctgaaccatgaccacggcctcttctgaaattatcactctgtttagaaccgtctgccggtcttaagtttgataagtccatgacattacctccttatcttaattaagcctcttcttcaactttaactaaatgtctaacctgctgtaccatacctctggtagctgcattatccggcaatacaactgtcttgttgagtttcttgagtccaagagcctcaacagtctttttgtgctttggtacggcgccgattgtagactttactaatgtaacttttaaatttgccatttcaatctaacctcctgtgcgcttgatcgggctattcttttgattagcctaagatctcttcaactgatttgccgcgaagtcttgcaacatcttccggtgtcttaacacctctaagtccttcgatagtagcaagtacaacattctgtttgttgttggatcctaaagattttgtacggatgttcttaattcctgccatctcgataacggcacgagccggaccaccggcgataactccagtaccttccggagccttcttaagaagtacggaagcacttccgaacttaccgattacatcatgtgtaacacttgcattctcgtcaagtgaaacgctgatcattttcttcatagcatcttcttttgctttgcggattgcttctggaatttcagtagcctttcccaaacctgcaccaacgtgaccgtttccatcaccaactacaaccaaagctgtgaatctcatgttacgaccaccttttacgaccttagtaacacgtttgattgataccaacttatctaataattccagctgactagcatcaatacgttcctgtctcatgtgtgttctcccttcttagaaattcagcccagcttctcttgctgcgtctgccagtgctttgatcttaccctggtaaataaagcctcctctgtcgaagacaacttctgtaatgcctttttcgattgctctctcagcaattacttttccaagatatgcagctgcatttacatcgtttgttttctcaagctctgctttcacttctttctgaagagtggaagctgaaacaagagtatttccaacagtgtcatcgatgatctgtgcatacatatgattgttacttctgaacacagctaaacgcggtctctgcgtagttccgctgaaacggttgcgtaatttcaggtgtttttttctacgaatttcgcttcttgatttcttactaaccattttcacactctccttatttatttcttaccagtcttaccaactttacgtctgattacttcatcagcatacttgattcccttgcccttatatggctccggtcttctcttatctctgatttcagccgcaaactgtccaactttctctttgtcgatacccttaacagtaatcttgttctgtccgtcaagtacagtctcgattccttctggatcgatcatctctactggatgagaataaccaaggttcagtgtcagtttatttcctgatttggcagctctgtaacctactccgttgacttcaagaactttctcatatccgtttgtaacacctacaaccatgttgttgatgagtgttcttgtcagaccatgaagagatttcattttctttaagtcgttcggtcttgtaacgattacttcttcgccttcaactttgatttccatttctaccggaagctcttttgtaagagttcccttaggaccttttacagtcactacattgttctcagcaacttctacagttactcctgcaggaattgctacaggcagtcttcctatacgtgacataccattttcctccttaacttagattctcggagcggatgctttgcccgctctgttttcagttactttataaaaaggaagttctttttgccagatgagatagactcaccggctcaaagaattcgcttttttaaattggttcatccactcaaccaggctcgaaaagacctcgccaagtttcgggacgggctttcgtactaagctcgataaaacctcgccaagtactcaatgcctaccaaacgaagcaaagaacttctccgcctacgccgagctttctggcttctttgtctgttacaacacctttatttgtagaaaggattgcgattccaagtccaccaagtactctcggaatatcttctgtattagcatatacgcgaagtcccggcttggagattctcttaattcctgagataactttctcatttttgtctacaccatatttcagtgtaatatgaagagtcttgaaacttccatcttctacaaggtcatattttgcgatatatccttcatctacaagaatgtcagcaatagcaattttcatcttggatgcaggtacatctactgtatcatgttttgcagtatttgcattacggattcttgtaagcatatctgcaattggatcgctcatagtcatgtgtgtgattcctcctatattattgcacagtatatcgtctgctgtgggctgccggactgaccatgcagccatgtgcaggtctgtaccggtcttttataaagcctaccagcttgctttcttaacacccgggatctgtcctttgtatgccagttcgcggaagcagatacggcagataccatattttcttaaatatgcatgtggacgtccacaaattctgcaacggctgtattctcttgtagagaactttggagcacgctgctgtttgattttcattgatgtcttagccatgaatttccctcccttactttgcgaatggcatattgaactgagtcaataattcacgagcttcttcgtcagtcttagctgttgtaacgaaaattacatccatacctctgactttgtcaatcttatcgtattcgatctccgggaaaatcagctgctctttaattccgagtgcatagtttcctcttccgtcaaatgcgttcgggtttactcctctgaagtcacgtacacgaggaagtgcaaggttgatcagacgatcaacaaactcatacatcttttctcctcttaaagtaactttgcatccgatcggcatgccctctctgatcttgaagttagctactgaattttttgctctggttacaaccgctttctgtcctgcgatcttctccatatctgcaatagctgactccagaagttttgcgttatcttttgcctcgcctacacccatgttgattacaaccttgtcaagcttcggcacttccatgatatttttatatccaaattttttgatcattgcatcaacgatctcattctgatactgatctttcagtctactcaaagtcctggacctccttccttgaattaatcaataacttcgcctgttgacttcgcaacacgaaccttcttgtcgccgtccatcttgaagcctactcttgttgcttttcctttatgaacatacataacgttggacgcatcaatgtaaccttcctgatgtacgataccgccattctgatttgcagcacttggttttgtgtgctttgtcagcatattgacgccttcaaccaggactttaccgtcttttttatctacggcaataactttgccttctttgtctttatctttaccggcgataaccttaaccatatcaccttttttaatcttcatagttgacatctaggcacctccctacagtacttccggagctaaggaaacgatcttcataaagtgtttctctctgagctctctggctactggtccaaaaatacgtgttccacgtgggttcaaatcgtcttttataataacagcagcattttcatcgaatctgatgtaggaaccgtctttacgacgagcacctcttacagaacggacaactacagctttaacaacatcgccttttttaacaacgccgcctggtgttgcatctttaacagttgcaacgatcacatctccgatgctggcatatcttcttgtagaaccaccaagcacacggatacacagtaactctttagcacctgtattgtctgctactttaagtctgctttcttgctgtatcatgcaggtaaacctccttcaaataattatttcgctttctccatgatttccacaagtctccatctcttatctttagacagcggtcttgtttccattactttaactgtatctccaactttgcactcattgttctcatcatgagctttcagtttataagttctctttacgatcttcttgtaaagtggatgtttaacgtggtcttcaacggcaacaacaattgtcttatccatcttgtcgctgacaaccttacccgtacgggtttttcttaaatttctctcttccacggtttttctccttcctgggattaatacggtagttaagctctcttagcctctgtaatcagagtctgaatacgggcaatattctttctaacttctttgattctgcttgtattatccaactgatttgttgcattctggaatctcaggttaaagagttccttcttagcagctactaattcttcatttaattcctctacggattttcctcttaactcgtttacaaatgtattaattttcactgttatcaccgccttctaagtctgcgcgagaaacgattttgcatttgcaaggtaatttatgcattgcaagtcgaagtgcctctctagctgtttcctctggtactcctgcaatctcaaacattacacggcccggtttaactactgctgcccaatactcaacagtacctttaccactacccatacgagtctcagccggttttgctgtgatcggcttgtctgggaagatcttgatccaaaccttaccaccacgcttgatgtaacgtgtcatggcaacacgggctgcctcgatctggttagaacgaatccagcatggttccattgctacgataccatattcaccgtaagaaatcttattacctctaagagccttacctttcatagtaccacggaactgtttacgacgttttactctttttggcattaacattatctatctctcccttccttatctgctttagtcggaagaacctcgcctttgtaaatccaaacctttacaccgacttttccgtaagttgtatcagcttctgcgaatccataatcgatgtcagcacgaagtgtctgcagcggaattgttccctcactgtagaactctgtacgagccatatcagcaccgccaagacgtccggatacggaagtcttaactccgagtgctccagccttcattgttcttgacatgcaggatttcatagcacgtctgaaggagatacggttctcaagctgctgagcaatgttctcagctacaagctgtgcatctttgtccggtctcttaacttctttgatgtcaacgatgagcttcttgtctgtaaactgagcaagctctgctttcaccttttcgatctcggaaccacccttgccgattacgacaccaggcttagctgtataaacaatgatcttaacgcgatcggaagctctttcgatctcaatcttggagattccggcactgtataatctcttctttaaaaactttctgatctcgtggtcttcaaccagattatcagcgaaatctttctctgcgtaccatttggagtcccagtctttgataacgccaactctcaagccatgaggattaactttctgtcccatattgtcctcctatctttcattcagcacgattgtaatgtggctcattctcttttcgattctgtaagctctaccctgtgctctcggtctgattctcttcattgtcggtcctttatttgcgtagcattcctcgatgtagaggttttcaacgctcataccgttgttattctcagcatttgcgattgctgatttcagtaacttctctataacgcttgaagcatatcttggattgtatgctaaaataccaagtgctgtctgtacatccttgcctctgatggcatcaagaacgaaacatgccttctgaacagatactcttgcgtaagaaatcttagctgaaggtcttgtatctttctgtgcgtttctttctcttttgatctgggatctatgtcctttagccatggatgaaccctcctttcaaactgtatgaaaattatctaacttttgatttcttctcgtctttgccgtgtcctctgtaagttcttgttgcaacgaactcaccgagtttgtggccaaccatgtcctctgtaacatatacaggcacatgtcttcttccgtcatgtacggcaaatgtatgaccaacaaatgacgggaagattgtagaacggcgtgaccatgtctttataactgatttatcacctgcagcgttcattgcgtctacttttttcagtaagcttgcgtctgcaaatggtccttttttaagtgagcgagccataggttctaacctccttgtgaatctgattatttaatcgctttaccatctcttcttcttacgatcagcttgttagaagctttgttcttcttacgagtcttaagaccgagtgccggtttaccccaaggtgtacatggacctggacgaccgatacttgtcttaccttctccaccaccatgtggatggtcattcgggttcattacggaaccgcggactgtaggtctgatacccatatgacgtttacgtccggctttaccgatattaatcaggttatgatctccgttaccaacaacaccgatagatgcacggcagatgatcggaaccattctcatttctcctgaaggaagtctcagtgtagcatactttccttctttagccataagctgtgcactgttaccagcggaacgaacaagctgtccgccttttcccgggtgcatctcaatgttatggatctgagtaccaactgggatctcagaaagtggcaggcagtttcctactcttacttctgcttcagcaccgttcataactgtcatgccgtctgtcagaccttctggagcaaggatataagctttctcgccgtctgcatagcagatcagtgcgatgttagcacttctgttcggatcgtactcgataccgataacctttgctgcaataccatctttatttctcttaaaatctacgattctatatttcttcttagctccgccgccacgatgtcttactgtgatcttaccctgtgcgttacggccagcttttctcttcttggaatccaggagggatttctctggagttgtctttgtgatctctgagaaatcagaacctgtcatctgtcttctggaaggtgtatatgggttataagttttgattcccattactgtctctcctttcgtttgctctgattattagtttcacgggtttgcaccgtataatgatcgatttagtctcatcaatttttagcttgttcggttcactaagctcggaaatacctcgctaacctcaccgaacggggtccgactaagcctcagccttcgctatcgcttgccttcgtcaagtcttataacccctcgaaaatctcgatatcagcactgtcctctgtcaatgctactacagccttctttgtcttagctgtctttccgaaagtcattccacgtctcttattcttaccatcaaggttcatagtgttgacgctttttacttttgtaccgttgaacattttttcaacagcttctttgatctgagattttgtagcctctgtgtgaacaaggaatgtatatttcttgtcagccataagctccatgctcttctcagttacaactggtttaaggattacatcataatactgaatatttgccattatgcgtacacctcctcgattgctgcaacaacagctttcgtagcgattactgtgttgtatttcaggatgtcatatacgttgatcgtatttacacgagctgtcttaacatccgggatgttcttagcagagatctcagcgttcttatctccttcttcaagaacaacaagtgctttgttcacgttcaggttgttcagaactgtctggaatttctttgtcttgatctcgtcaaatttcatttcatcaactacgatgaacttattctcttctactctggaagtaagtgcagacttaagagctgctctcttctctttcttattcattttgaaggagtagtctctcggaaccggagcaaatacaactccaccgcctgtccactgaggtgatcttgttgatccctgtcttgcgtgacctgttcctttctgtctccatggttttcttccgccgccggaaacttcagaacgagttttggctttctgtgttccctgacgattgtttgcaagctgatttacaactgccatgtgtacgaggtgctcatttacttctacaccgaatacagcatcgttcagttcgattgtatcaacttctttaccttcgatattgtaaacagatacttttgccatctgtatgttcctcctttcttaactgtcagactagttagctttcactgtctctttgattgttaccaggcatttcttcggtcccggtacggatcccttaacgaggagcaggttgttctctgcatcaactcttacaatttcgagattctgaacagtgatcttcttgttacccatctgtcctggcatcttcttacctttgaataccttacttggatcagatgcagcaccgtttgaaccagcatgacgatggaacttggaaccgtgtgtcataggtcctctgctctggccatgacgcttaatcgcaccctggaaacctttacctttggaaatagcagttgcgtcgatcttgtcgcctgctgcaaagatatcagctttaatttcctgagcaagtgtatactcttcagcattttcaaatctgaattcttttacatatctctttccagatacgcctgctttatcaaaatgacctttttcagcttttgtcacaccgtttctgtgagcgatggacttcttaccactgttgtcttttgtgacaatcttttctttcttgtcaacatatccaacctgtactgcactgtagccgtcattctcaactgtcttaacctgtgtaactacacaagggccagcctgcagaactgttaccggaatcagaactccgtcttcttcattgaagatctgagtcattccaacttttgtagctaaaatagctttcttcattataattacctcctgtgatttacagcggaacactttcgtgctcatcctaaattttaggaatactgttctaatttagatttcgtcttatttagacttcatcttgatgtcgataaatacaccagccggcatttccagtctggaaagtgcatcaacagttttctgtgttggtgtgatgatatcgatcagtcttttatgagttctctgctcgaactgctctctggaatctttgtacttgtgtacagctctcagaattgttacaacttccttcttagtcggaagtggtaccggtccactcacctgtgacccgttcttttttacagtttcgatgattttctttgcggatgcatcaacgagctgatgatcatacgcctttaatgtgattctcattacttgacttgccataaaaaaagtcgcctccttttcgtacttttgacttcagtacgacaagcggtgactgtacactctcccgtgtgtgtcgtgagaaactcacacgttgtttcatactactaccttatggtatggtaaacagtaatcagttgtgattcgtacagtgacttgtcgccagtttcctaacttgacattcgctccacggaaaacctgcccttgcttatcttttttttgcaggacagcaacctcacgcttcattgctatcatgtcacagctctcttagtataaatgatactttcctttatttcaagtctttttttttatttattgtattttttttcgtacattgcagattcttgacatataccaattagaatggtatattatatctgacttgtagaagaaccaaaggcggttttccctgtagggagaccgtctattttttttgcaggtcagatccttggtcatcgtgcagtattgcagtatgccagagccggacgtttcccccaagaatgtccctgccgcggcaaaatctccttctgcatttatatcctctttgcagggattccccagttaatatgcagatgttctgcccgatggctcaagaatcctctcaattacataccatgaaaataacgctgctgtccggagttgcagatccggatgtgcagcgttattttcgttttctgtataaaatttctatccggcattctctgcctgattcctgtgtgacattttcttcccactgtcatttatcattttcttcctattataataggaaagaactctttcagtttacagaatctttccggtaaaactttctcttctgaacagttcagcgatctccgggaatatttccacgcttctttttaatattccatgcgtatatgcgatcagtatcccataatttgtcattggtactttctgcccttttgacctctccagccgaatctgcatttcccgttcattaagcatacatcctccacaatgtacaaccattttataaggactcagatctgcagggaactctgttcctgatgtagtttcaaaaagaagctcttttccggtatactccctgatccatttcgggatctttaccgttccgatatctccgcactgccgatggtgagtgcatccctcgctgatcaggattttatctccgtttttcagcttatccaacatcataactccttctatattcgttctgagatttcccttatagcgtgcaaacagaatcgagaatgatgttaattttatctcttttaatacatcgcatgctactttcttaaacacctgactgtctgtaatcacaagctttggcggtattttcagattttcaatggtttctttcactctgtcctctttggtaacgactgaaattgctcccgattccagaatgtcccggatcgtctgctgttgaggaaggatcagccgcccttttggtgcagattcatcaatcgggatgacaatcacaacaacatctcccgattccagcagatctcccacgattctttttttatttttctctgtgcagatgctttccccgattcttttctttaattcacggattccttctcctgtctccgcacttacataaatcaggctctcttccggcacttttccactgccctttgactgtatccggtgttcttttaaaagatcgcttttatttacagcaatgataaaaggcacctttcttttttctatttccttcagcagggcaaaatcttctttctttatgcctgtccctccatcaatcactacgatagccagatccgtccgattcagcatctgatagcttttttctacccgcagctttccaagttccccgtcatcatcaattcccggcgtatcgatcattacaaccgggccggccggaagaagttccatcgcttttacgaccggatctgttgttgttccctttacgttggagactacagccagattttgtcctgtcaccgcattgacgatacttgattttcctgcattacggcagccaaaaaatccaatatgtggcctttctgctgccggagtctgattcagattcattctcctgtcctttcctgttcctatttttatccgtccatgtttcagatagattgccttaacggcaagttacttttctttatctttcattctattatacacaattcaccgcaaatacgttatactgatattacctataattatgattttttacaggaggatttatttatgcttataaaaaatggttatataattgatcccgcttctggcagagcggaatttgctgatcttcagatttctgatgggaaaattttttcaatcggacagcatctttcagtttccccgtcagaagagatcattgatgcttcaggactgaccatcgctccgggactgatcgacacccacgttcattttcgcgatcctggcttcacctataaggaagatattcatacaggtgcttctgcctccgctgccggcggattcacttccgtgatctgtatggcaaataccagtcctgtcgttgactcagtttctgtattttccggcctcgctgcccgcgaaaaagaagaagctattcatatttatcaggctgctgccgtttcccatgatctcaaagggacagaactgactgacatgaaagctcttgccgctgccggtgcgtgcggatttactgatgacggcattccgttaaaagatgccgccttccttctgaaagccatggagcttgccgcacaactaaacctccccatcagtcttcatgaggaggacccgtctttcattgaaataaatggaatcaaccacggagctgcttctgattttcttgggatctacggttctccttcgattgctgaggaatcccttgtcgcccgtgactgtatgctcgccctgaaatccggtgcagatgtcgtgatccagcatatcagttccggaacttccgtggaactggtgcgtacttttaaagctcttggagcaaagttgcacgcagaggcaactcctcatcattttacgctgactgatgaggcagtaataaaatatggttctcttgcaaaaatgaatccaccgcttcgtacagaaaaggaccgtcttgccatcatacagggactttgcgacggaaccatcgacatcattgccactgaccatgccccgcacagtgcagaggaaaagagccgtccgattccatcggctccaagcgggatcatcgggcttgagacttcacttgcacttggcatcacttctcttgtacgtccgggtcatctgactctgaatcagttactcgagaaaatgacagttaatccggctcatctgtatcatcttccttcaggaaaactggaaccgggggctcctgctgacctggtactttttgatccgaacgaaaaatggattccgacagagtaccattccaaatcttgcaactctccatttaccggttgggaattatatggaaaggtaaagcggactatctgtgcaggaaagacagtttacactgattgatctaaatcgatttgatttaatccctcaataaaaataccggctatacagatcctgcatcctgttcaggtccgctatagccggcatttttatccactcttttatattgcagcttttcttttatatctctgcttttatttcataagttcttctgccatctcatccagctctttcaggttctcttcactcagagaggacataatcttcactggtttctccagcattgtaatatttttgctcttctccaacattcctgcaatcacttttcctgcagtagatgcccaggaaccattttcaatcagaccgatcgtccggttctgataattccgttctttcagatgttcgatgaaagttctcataaatgggaagatatctccattataagtgattgtggcaagcaccagctttccataacggaatgcatcctctaccgcctctgccatatcctcgcgggcaagatcacataccacaactttcgggcagcctttttccttcagtttttctcccaacagctctgcagcctttttggtatttccataaacagaagtataagcgatcataacaccttctgactcaacgccgtaagaagaccaggtctgatactgtcccagataatgctccagattttcgcttaaaaccggtccatgcagaggacagatcttttcgatttcaagtgcagatgcagccttcagaagattctgaacctggacaccatactttccaacgattccaaaatagtaacggcgtgcctcacagtcccagtcttcctctacatccaatgcaccgaattttccaaatccatccgctgagaacaacaccttatccgtactgtcataagtcaccataacttccggccagtgtaccatcggggcgaagacaaacgtaaggatatgctttccaagttccaacttctcctggttcttaactacgactttctttccctctaaatccaggttgcggaaaaagttggatatcatagtaaatgtcttcgcattgcccacaatctttgtatccgggtatacttccatgaacttctcaatattggctgaatgatccggttccatatgctggatgatcagatactccggtttcgctccgtccagtgcattctttacattctccagccattcttctccaaatgcctcatcaactgtatccataactgcgatcttttcatcccggatcacataagaattataagccattccattcggaacaatatactgcccctcaaataaatcgatatcatgatcgttcacgcctacataaataatttcatccgttaccttcatcttctctgccctttctttcatgatgtattttattcaccttgagtataacgcaattaaaaatatatggcaatcccgtcttttcaggattaaaccatacactcatccactcccgctctgttaatttctctttcagccaaaatcttttctatcagctctttgtcctcaggcggtgcggcccacgccagcccacaccctgcggacagaatccggggaaccgggatcagccgtcccggtattcccttttctttacagatcttttccattgccatcgcatctgctgtcgtatgaaaggttacaacaatttttaattccttttttcgcatgagaccactgccccttctcattgcacccaaaactgcaacttattttttcccttcgttttcaaagtattcttttacaagcttcacaacaacccctgataacaggaacactgcaagcaggttcgggattgccatcagtccgttaaatgtctccgcaatactccacatcaggccaagatccatcgtagcaccgacgatcgctaccagcgaataaagtaccataaatggtttattgacttttgaaccaaacaaaaattcaatacatcttgttccatataagccccatccaaggattgtggaaaatgcaaaacaacacatggcaactgcggtaaaaatagaaacccagtttccataagtagaagtaaacccgttgatcgtaagctctgcacctgcagcctcaccataaccaatggaaacgccactgcaaagaataaccagtgctgtcattgtgcagatcacgatcgtatctacgaacacctcaaaaattccaaaaaatccctgcttgaccggtttctgcgtatcagcacatgcatgggcgatcgaacctgtaccaagacctgcttcattagaaaaaattcctcttgatacaccttttttcatactcataaagaaacttcccactgcaccgcctgtaacagaagccggagaaaatgcaccttcaaaaattgatgcaaatacacccggaacattcttgatattcaacaggatcacgcccagtgccagcagaatataaacgactgccataaacgggaccagcttctctgtaacccggccgatcctcttaatccctcctaaaaggatcagggcgatcaaagcggcaagaacaattccgatgatcaggttcaatgttcctgactttcctgcttcaatgactccataattgatcaatgctgaatcgatcgctgtcgtgatcgtattgacctgagttgcatttcctgttccgaatacagtcagcacaccaaacgctgcaaaaagatatgccagccagtgccagttcttcttcagtccattttttatgtagtacattggtccgcctacaagatctccatctgcattcttttcacggaaatgaaccgcaagcgttacttcggaaaactttgtacacattccaaggattgcagagatccacatccagaagaccgcacccggacctccgatagcgatcgcaccggccacaccggctatatttcccgttcctaccgtagctgccagtgccgtacatactgcctgaaacggggtcaacgctccgtccgatgcatccctcttcctgagcattcgtccaatcgtcaccttcatcgcatacgggaatttgcagatctgtaaaaatctcgttctgaagctcagcagcagaccaactccaatgatacagatcattgccggcacaccccatataaagttgttgacaacattatttactgattcaatcgtagataacattctttcattcctttctcatctgaaactgcggcatcctttctccaagtcagcttccccaaaaactgtcattttacatcaacgccgctttaccttgccaaaccgcagtttaactgttgaattatagcatattttcaccttaaagtacagaatttacataagattcttctcttgagtggcagctctttcctgtgctataatcataaggtcatatatagcagcattttattttgcgtgaaatgcttacagatcagaaaggacttttatatctatgtggattgcagataattggaaagactatgaaattattgactgttcaaagggggagaagctggaacgctggggcaaatatcttctcgtccgtcctgatccccaggtcatctgggacaccccgaagaccgaccgtggctggaaaaatatgaacggtcactaccatcgcagcaaaaaaggcggtggtgaatgggaattttttaagcttcctcagcagtggcagatccattacggttcgcttacttttaatctcaagccgttcagttttaagcataccggtctttttcctgaacaggcaaccaactgggactggttttcagaaaagatccgcaacgccggccgacctgtcaaagtactgaatctctttgcctataccggaggagctaccctcgcagccgcggctgcaggtgcaactgtcactcatgttgatgcctccaagggaatggtcacctgggcaaaggagaatgctgtatcttccgggttgaaagatgctccgatccgctggcttgtagatgattgtgtgaagtttgtagaacgtgagatccgccgtggcaacacctacgatgccattatcatggatccgccttcttacggacgcggtccaaaaggtgagatctggaagattgaagacatgatccatccgttgatccgactctgtgcaaaaattctgtccaaagatgcattatttttcctggtcaactcctatacaacgggtcttgcacctgcagtactgacttacatgatctccaccgaattaaaatcctggaacggtcatgttgattctcaggagatcggactccctgttacaaattcaggactggttcttccctgcggtgcttccggcagatgggaatcccgttgatttttctgatactggttgcctttttacattgcaaatcatatgaaaaaagcatcggaataaggaatctcttccaagagttttctttccggtgcttttcctttgcttttctttacttctcttttttccggctttctgattcatcttacctggattgacccaagaatctccccaataggtgctgcaatgctcagttctgcccggactgctttctccgtgctggatttattgataacaaccaggtgctttccccgaaaataatcaataaaccctgctgccggatatacaaccagcgatgtgcctccgataatcagtgtatctgctgaaccgattgcccggacggcaccatccattgtctttgcatccagtccttcttcatatagtaccacatccggtttgatctcgccgccacaggaacagtgcggtacaccttccgatttttttacatactctgcgtcataaaattttccgcatttcatacaataatttctatggatacttccatgaagttcatatacttttttactgcctgccgcctgatgaagaccatcaatattctgcgtcacaactgcctgaagctttcctgctgcctcaagctctgccagcttcagatgtgccgggttcggctttgcatccaacatcatcatcttctctttataaaattcataaaatgcttccggatattttataaagaaactatgactgacaacctgctcaggagagtacttgtatttctgatgatagattccgtctgcacttctgaaatccggaatcccgctttcagttgagactcctgctcctccgaaaaatacgatcctgctgctctcatctataatcttctgaagttccgctatttccttttcatacatcttttctttcctcaccacatacagtaaatgcggtacatacttcatgtaccgcatctcctggaaataattttatgtatcttacagatctactcttccggttgtatcgccattgacaacataatatgctgctgactcttccggtttcagataaatcttgacatccttcatctctccgacttttctcttaagattctttgtccagatctctttcactttctgaaggatctctttttctgtatattccttacctgcaaactgaaggaacatctccgtcttaagctctgcctttttggctgttgacttcttcgctgctgtcttctttgctgcagtctttttcactgctttatctgctgcctttgcagtagcttttacagctttttccgctgtctctgcagtagcttttacagctttttccgctgtctctgcaactttctttacggctttcttcgctgtctcttttgctgcagtctcttctgtctgaacttccggtgtatccactaatactgctgcctttgtctcgagcttcattgtagaatctttcttagtctcaatcgcttttgcagcttctgtctctttcttatcggcctttttttccggctttgcaaccggagtctttgctgctttctcttctgctttcactgcttttgctccaacggcttctttaacggctgctttctcttctgctttggctgctgttactttcactgttgaatttgctttctttgataccataatctcgtttccctcctaaattatacacccaagtacaatggatttttcctgctttgtacttgtgaataaattcacagttctatcagattgtaccgcattttttccaaaacgtcaaatttaagaatttttcctttatttttctacctctcatgaccgatcctgattatcagaataactcctgaaaaaagtatccagtcctctcagagtctttaacagtaccggaatttccgtctcgtccagttcctcgatcacagcattcgtcatctgttcatgaaactttgcatgatgcctgtaggcccgctgccccttttctgtcagccagatatagaccaccctcctgtccttctcaccacgttccctcaaaacgtactttttattgaccagtgcattcattgccgtcgtaagtgagcctgctgtgatcttcattttttttgccaccacagacatcgtcgtctttccggtcagaccgattgcctcgataatatgcatatcattgttcgtaatatccttaaactcttccgttatgatcgcatttttttccagttcccatatttcattaaataaatgtaccagaatatcattgatcgtctcataggtattcattcctgatttccctcctccgccttatcatcccggtgcatttatccgtcatttacagctttctgaaacgctcgccccatcctgtccgctacagctttctgaaacgctcatatcttccttccagcaagtctttcgtttccagcttctggtattttgtcagaaactctgccagacctgcccgcagcagttctgcagttggtttcatcgtcaaaacactgaagttttgtggttccgggaatactctctcgatcacccccagtttcttcagatcggctgctgtcagtttcatcatctttgctgcttcagccgaccggctgctgtccttccataaaatgcttgcaaacccttccggcgaaaggacagaatagacactgttctccagcatccacacttcatctgccaccgccagtgccaatgcaccaccacttccgccttcaccgatcacaacagaaagtaccggcactttcaatccagacaattcaaataaatttcttgcgattgcttctccttgcccgcgttcttccgcctccattccgcaaaatgcacccggagtatctacaaaattgatgaccggacgatggaatttttctgcctgcttcatcagccgccgtgcttttctgtacccttccggggaaggcatggcaaaattccgttccagattttcttttgtcgtcctgccttttgcctgtgcgatcaccgtcacacagattccctgaaaatatgcaattcctccaatgatcgccggatcatctctgtaatatctatctccatgtaattctacaaaatcttcaaacaaaatgtcaatataatccttgccgaccggacgctcttttgaacgagatcggcagacccgctcccatgccgtaagagatttttcagaccatggttcctgttctgctgctttctttcctgcttttttttctgtcattcctgccttttggaccggttctgttctgtcggattttctgatctcttttccctttctgcaatccgggtggacatgatcatgcattttcaggatccttcccaaaaccggcttcatattttcccgctttacaatctgatctacaaatccatgttccaaaagaaattctgcccgttgaaatccttccggcagtttctccccaatcgtctgctcgatcacccgcgggcctgcaaacccaatcaatgcctgtggttctgctattataatatctcccaacatggcaaagctggctgtcacgccgcctgtcgtcggatctgtcagtaccgtcacatataacagtcctgcatcgctatgacgttttaatgccgctgaagtcttttccatctgcatcagcgaaataatcccttcctgcattctcgctccaccggaacaggtaaataagatcacaggaaggttttcatttgtggcacgttccaccgcccgggtgatcttctcgccgactgcataccccatgcttgccatcataaaacgcccgtcacagactccgatcactgcctgctttccgttgatttttacacgcccggtcacaacagcttcttttaatcccgtctgttccctgagtttctttatcttttcagaatatcctttaaattgcagcgggtcaggcggaccgtccattccatccagatccatatcccactcttcaaaacttccttcatctgcgatcatctcaatccttttgtatgcaggaactctgaaatacccatgacatttcgggcaaatatatgctccattgatcacttcttccgacaggattgccgcaccacatttattgcattttttcaaaagtccttccggtgcttccggtcttcttcttaaacgcccctttcgtacaggattctctctttcccctgtctttttaaacatattctgaagtctcatttttactcccttcttccatccctgcatcacgaaaatcctgcttctttatgccaaaagtccttttgcctctgtaacaaattccacatcaatatttcctgaaataaaatcagggtggtttaagattgaatactgataatctatattcgtttcaatccctttgatgattacttctcctaatgcacttttcattttatggattgcttcttccctgctgtctccatgaacgatcagctttgccagcatagaatcataacagggcggtacctgataacctgtataaaccgcagtatctacacggattccttcccctcccgggaaatgcacatctgtgatcgtgcctggtgatggtctgaaattcttcatcggattttctgcattgatcctgcactcaatggcatgtccgctgatacgcacttctttctgcttcatgccaagtttctgaccatctgcaatcctgatctgctctttgatcagatccacccccgtcacccattccgtgaccggatgctccacctgaatcctggtattcatttccataaaataaaatgctccgctcttttcaagaagaaattcgatcgtaccggcattcctgtagcctgctgcctttgcagcccggacagctgcctctcccattttcttacgcagaccggcactcagtgcaaccgatggagattcttcgatcattttctgatggtttctctggatagaacagtcacgttctcctaaatggattacattcccatagttgtctgcaagaatctgaaactcgatgtgcctcggatgctttacaaaatgttcaatatacatcgtttcatctccaaaagcgatcccggcttctttccgtgctgtctgaaaactctgctcaaattcttccgggttctgtgccacacgcattccctttccgccaccaccgagtgctgccttgataataaccggataaccgattttttttgcgatctttgccccttccttcacatcataaactgcctctttactcccaggaatgaccgggactcctgcttttatcatggtattccttgcctcggatttatttccgagccggctgatcacgtccgatggtggtccgatatagacaatattacactgctcgcacaaccgggcaaaccggctgttctctgaaaggaatccaaatcccggatggattgcatccgcaccggataccagcgtcgcactgatgatgttctgcatattcagataactgtctgtggaaggtgccggacctatacatactgcttcatccgcaagctgtgtatgcagagcatccctgtctgcctctgaatatactgcaacggtacggattcccatctctctgcacgcccggatgatccttaccgcaatttcacctctgttggcaatcagtatcttttcgatcatatcttactctcccatctgaaacttactaatgctaaaagctattcgcctaccataaaggtaagctctgctgtcactaccgtctttccatctactgatgctgtcgcttcaccgaccccgaccggaccttttcttttgatgatcctcgtttccagacgcagcctgtctcccggcaaaaccattcccttaaaccggcacttctgaacgcctccgaaaaatgcaatctttccacgattttccggcagacttagaatcgcaactgcaccggtctgtgccagtgcctctaaaatcagcacacccggcatcactgctttctgtgggaaatgcccccggaagaaatcttcatgataggaaacacccttgtatcccacggcatattctcctggcacgtaatcctcaatctgatcgatcagaagaaatggatgtctgtgcggaataatctgctgaatctgttctgtatttaaactgtgcatcgttctgtcctgacctttcctgttatccaactgcaaaaagtggctgtccatattctacggactgaccattctctacaaaaacttctgtcactgttcctgcaaaatctgattcaatctcattcatcagtttcatcgcctcaatgatcgctacgatctgacctttttccactcgctccccgactttcacaaacggctcttcatcttctgccggagcagcatagaacgttcctaccagtggtgctgtcacaatttttccttttttctgctccggcccgtctgcttcatttttatttaatgcggctttctgctgcacaatttcttccgtacatgacacctcttctatctgctgtccagactgaattggctgtagtttctttttcaaagagatttctgcattttcatctttatattcaagctctgtaaggtccgactctgatactgcatcgatcaactgcagcagttcttccattttcatactcatgctctactcctcatagcgttttacgatcagtgacacattatgaccgccaaatcccagggaatttgacattgcataatcaattttcttttccaccggagaaccaactgcataattcagtccacattctggatctatatgctctgtccctatggtctgatggataaactgatcctcaatactctttacacatacaatcacctcaacagcaccggctgcacccagcatatggccgaccattgatttggtagaattgatcactaccgtttctgccgcctttcccagtgcataacggatcgctcttgactcaaacagatcattatgatgcgtacttgttccgtgtgcattaatatagtcaacctgctctggctgtattcctgcttctttcatggcaaacttcatcgccatgcctgctccggatccgtcttctgcaggggaagtaatatgataggcatcaccggttgatccgtatcctgccatctccgcatagattctggcacctctcgccttggcatgctccagttcctccaatacaacaattccggctccctctccgatcacaaatccatccctgtctttatcaaatggccgggatgctgatgccggatccggattacaggacaatgctgtcaaagctgtaaatcccgctacaccggaaggacagatacttgcttctgttcctcccgccacacagacatcaagatctccatactggattgcccgcatagcatctccgatgctgtttgcccctgaagcacaggcagtcactacatctgtacattttcctttcagtccaagctggattgatacatttcctgctgccatattggagatcattaacggaatcatcaatggattcacgcgtcccggaccacgctcctgcagttttttataatttttttcatgacactccagtccaccaattcctgagccaatgattgtcccgatacggtagggatcttcctctgccatatccagtcctgcatcttcaaatgcttcttttgctgccgccactgcatactgggaaaaagattccattctttttgccgctttaaagtccattcgttcttttgcgacaaaattctttacttctgctgcaagttttactttatattctgatgcatcaaaatgtgtgatgggagcgattcctgattttcctgaccggattccatcccaaaattcctctatggtattcccgatcggtgtcactgcacccattcctgttataactactctgcgtttcatttcttttcctgcctccttctacattgccatgccaccgtcgacatggatcgtctgtcctgttatataccgggcagaatcagatgcaagaaatgcgactgcttctgcaacatcttccgctgttccaaaggctcccatcgggatctgtgccacagcggattccctgactttttccgtaagaactgctgtcatttctgtctcaataaatcccggagcgactgcattgacagtaattcctctggatgcaagttctcttgcagcacttttggtcagtcctatcacgcctgctttggatgccgagtaatttgcctgtcctgcatttccaaggattcctgaaactgatgacagattgataattcttccgcctctttgtctgagcatctgccttgcagcaaaccggatacaatggaatggccctttcagattggtatcaagaactgtatcataatcttcctctgacattttcatcagcagaccatctctcgtgatccctgcgttattgaccagaatatccagtcttccaaagtcatccgttacttttctgatcattgcttctgtggcctgataatctgccacattacactgcatgatttctgcaattcctccgtcagattcaatttctgctttcacttcctttgctttctccattgaaccatggtaattgatcacaaccgccgccccctctgctgccagcttcaaagcaatcgcttttccaatcccccgtgaggctcctgtcactaatgccacttttcctgtcaatgtattttgcataactcatttaccacctttttcagatcttcgactgtactgatattgtatgtccgtacttctctgctgatctttctcataaatccggtcagtgttcttcccggaccgatctctataaaagtatctacaccctgactgagcatttcttctacactctgctgccatctgaccggtgccgccacctgctttgcaagaagttcttttgtctgatcgatttctgagacatattccgctgtcacatttgtcacataggggatttttaattctgaaagttccacatttttcaattcttcttccagctcttttcctgcttcttttaataatggagaatgaaatggcccactgactttcaacggaagaattctttttgctcctgctgctttcagccgttctgctgccttttccaccgcatcggtccatccggtaatcacgatttgtcctggacagttataattggcaacactcacaccttccattgatgccaccgtcttttcgacgatttctcctgaaaggcctaacactgccgccattgcaccttgtccatccgggatcgcattctgcatcagaagtcctctttttcttgtgatccggattgcatcctgcaacttcatttccccggccgttacgattgcacaatattcgcccagactcagtcctgctgtcacatctgccacaagtccttcttcctcagcgacacgctccatcgccatgcagactgtcacgagtgctgcctgtgtatattctgtctgatccaatctgtcattttcttcaaaacaaagctttttcatgtcaatgccaagcaattctgttgcctggtcaaaaaccttcgcagccgttttgtactggtcataaaaatcttttcccattcccactttctgcacgccctgcccggggaaaataaatgcaactttactcataaaattctgctcctccaagcaatgtatctgtctcctgcaccagcttttcgatcacctctttgcaggacattttttctttaatcatccctgcgatctgccctgccatgacacttccattctgaacatccccatcgacaactgcttttttcagtccaccaagtgtcagtagctccagttcttcaaacgcagcaccttcctgctctttctgtaaatatgtctttgtcatctgattgcggatggcccgtaccggatgtccggtagcacgccccgtaaccctggaatcaatatcccttgccttcagaatacagttcttgtaattttcatgtacctgtgcttcttctgttgcaacaaagcgggttcccaactgaactcccttcgctcccagcatgaataccgctgcaacacctcttccatctgcaatcccaccagccgcaataaccggaatctgaaccgcatctgcaacctgtggaacaagtaccatcgttgtattttctccgatatggcctcctgcctctgttccctctgcaaccacagcatcggctccgcaccgttccattctctttgcgagggcaaccgatgcaaccaccggaatcactttcaccccggctgctttccacatcttcatatatttttctggagagcctgcaccggttgtcaccaccggcacagcttcttcaacaattacttttgctacttcatctgcatgaggactcatcaacataatattcacaccaaaaggcttctccgtaagctcttttaccttctgtatctgttcccgtacccattcagctggagcattggctgctccgatcagtccaagtccccctgcctcagatacagccgcagccagatgatattctgcaacccatgccatgcctccctgtataatgggatattcaattccaagcagttctgttattgatgtcttcattttaaattcctctttctatttgtgactttccacataagaaaccacgtctccgaccgttttgatttcttccagatcttcactcggtatttcaatttcaaaagcttcctcaaacgccataaccagctcaaaaagatccagtgaatctgctccaagatcttccttgaatgaagtatctgttgtaagtgtatctgcctcaacatttaatgactctgctacaatttccttaatctgctctaacatttttatttcctctcttttcttttcattttttcttttcgtttttctatgtaataaggaaaagcatccttttcctgactaccattcaaataagcaccctgcccaggtcagtcctgcaccgaatcctgccagaagaatgctctgtccttgctttaaaattttcatccggttcatttcatccagcaaaacagggatcgaagctgccgaagtatttgcatatttctccagattcaccgggaattttgaatcttccaggtgcaatcttctggcaacagcttctatgatcctttgattcgcctgatgcaatacaatatggtctacctcttccggcctgatcccggccttcccggtaagctctaaaatcaattccggcactttgcgtactgcaaatttaaagacttcctgaccattcattttaaggaacaactttgcacttcctacaagagcctcgccctttgtcccgtcagaatgtgctgccatatagcaatatccctgctcttctgcctttaccacaactgctcccgctccatctccaaataaaatacacgttccccgatccgaccagtcaaccatcctgctcatccgttctgccccaatgaccagcaccgttctgcatataccggaatggatatacgcctgtgctgtatgaaaggcaatcacaaatccagaacatgccgcatttacatcatatcccacagcattagctgcaccggtcattttttggacttcacatgccgtacatggataaaccgtttctgatgaagaagttgccacaaggatcatatcaatctcctccggttctgtccctgcattttccaaagccttcagagccgccattgaagccatataagacgtggtctctttttttgctatatgacgctgcctgattcctgtcctctcctgaatccattcatcactggtgtctacagattctgccagtttaaaattatctatgatatagtccggcaaatatgatcctgttccacatatttttccaatcatttttttctccaactctcttaaaataatttgagtcttaaatactttgactttcaaagtataacataataaaaaaatatgtcaacaaaattttttcatttttctttccagttaatccacagaattttttaatgtaataccatatacagtatttatttgcaatggatcactttctgcaattttcccgtcataatatactacaacttcatcaccgacagatacctctgcatagttgtcccgatttttttcatttaacgatactttacacctcgttccatcaggatatccttccttattaatttcaagcagaatagaattatcctgtacttccaggacagttcccgtaatatctggcttattttgcagatttctattcacattccgattgctgcagcctgccaggttcaacgcaataattaatattaaaatgaatgatgtccactttttcaaacttttctccttctcccggtagcccttacgaactctgatattggaaatacaaaggtgcaggacatccggtggatgtccgctttgcaccgaccgcagcggcagcggcgatccccaaaatctgataacacattataacataaaattattcataagtgaaagcagagtatcctgctgttcttataattttgcacaatctattataattttctgacacagatcataccctaacacagaactgttcaaagacatggtatagttctctgccattccccatttctgttcggtataaaaattatagtttgttctgcgtcttttatctatatcatttatcatttttatagcatccacttctgtaacattatataagctgcagatacgccggactttttccggtatgcttccatgtataaaaacatttaatacatcttttctgtcctttaaaatgaaatctgcatttcgccctatgattacgcagttttctttttcagcgatttccataattacttttctttgtgcttcatacaccatatcttctactgattttcccgtaatatcacgaccagaaaaagcatacgcaaaccatcctttcttcggagataactcagcattttcccgaacatactccgatgataaccctgcctgttctgcaatctgtccgatcatttctttatcataataggcaataccaagcttttttgccacttcttcaccaataaaacgaccaccacttccgaattccctgctgattgtaataattctctttgccataactgtctcctccttaacttaatctttccactttgttctttcggattttctttaaaaatacatatcccaccagacaagcaataagctcagtaattgggaatgcccaccagatcaatgaaatccccatctgtccgtttctgacaaaagtggagaaaatgcccgccagtggtaatatgactattaactgtctgagtaatgaaatcaccagcgattctataccaccatccaatgcctgataaattccctgatatgctacattaattccggcaaaaataaagctgacagagataattctcatggctccgataaaatattctctggactgtcctgcattaaataaagtagcgaaagcccccgggaaaatttctgtaatcgctacaccaacaatcataagtacaatcgtatagatcaatccatacttaattccatcctgaactctctttttgctgtgcattccatatgcaaaagcaataatcggtgtaatcgcatctctcagcccaaaggcaaggaataatacaaactgctgcactttatagaacaacccataggctgtctgtgccgatggactgaacttcaatatcagattcattgcataaaccataatagacataagtgcctgtgcaataattgccggaagtccgatggcatagatttcccggataattccaccatccggtttcatatactttacattatgctcaaattctttattcatctttatatggaatacaaacaacaataccgcggacaccacctgaccgattaccgttgcatacgcagcaccttccactcccatttcaggaatcggtcctattccatagatcataattggatcaagaataatatttatcactgctcccacaacctgaccaattgttgaataaaaagaacgtccggttgcctgtagcagtttttcaaataatgagaaggaaataattccaaatgaaatgatacaacatattctcagatagctcgttcccattgaaacaacctccggatcaactgtctgtgatgagatgtatgcttttactccaaaaattccaaataacaagcatattgcataaatgattattcctaaaaataagctgtttcctgcaacttttgcagcctttttctcatttccctgtcccagggttctcgcaagaagtgcattagtccccacaccagttccaattccaaccgccaccattagcatctgaacagggaacacaagtgtaagtgcattaagtgcagcctcacttcctcttctcatgtttcctacaaacgcactgtctacaatattgtaaacagcctgcaatgccattgataagatcatcggtattcccatctgtaccatgagcttatttaccgacatttctctcattttgttaccttcagccatcttaactaaatcctccttttctgcataaaaaaagtgtgaacttatctgataagccggacttacgctgataagctacacactttcgatgatattatatattttaataatgtgcgacatcagttgcacaaaaaaacgagtagcaaaactggatttacgctaatctgctactcgttcaaaagtcattatattttctttttagtgaaaagtcaaacaaaaattgtcacaaaaactattctcacataaaaactattctttattattgtaacaaaatatcatacaatatcttctacaacgcagttcttttctttggaataaatagatggctcatatctgcatgttccagattaagcagtgaaatttttttatcaattccacctccatatcctgtcagacttccgtttgtacctactacacgatgacatggaataataatggaaatctcattatgtccaacggctcctccgactgcctgggcagacatacggggaacttttttcacttcagccatccggcgagcaatctctccatatgtgatcgtctgcccatagggaatctgcaataggagctgccacactgcctgtctgaatgttgatcctgctggatgcagaggtggcgtaaatgggggttcttctccggtaaaatacacatccaaccatttttttgcttctctgagaatctccgtttcctgcaaaattctttcatctggaagtgtatttgcaaaatatttctgtccttcgaaccacaaaccagtaagtccttcttcatcagaagctaaaaggatattaccaatctgggatttgtatctactgacatatatcatatttattcctcaaaaattatacctaaaaaatgtatcagagccctgaattactttttgtacctgtctattctttttatcatcattatatcatgatcggcaccgatggtgcctggagctgctttgcagcgatcatgatcgccattcgccgctcgcactgaaaaagcaatgctttctcctgctcgctaacgctcattatatcgtaattcactttattataccgcattttatctcctatgcatatcaaattatattcctcataataaaatattgtcactgaaacaggagtttatcataaagtgttcaaaggtgttcaaactttttcctttaaaaaaataagagaaacgctgtaaattcaacgtttctcccattttttactaatgccgcagaccggctaccctatatatataaataggtataaacactgtaagaatatttgattttcacaaatttctcacacatttcaatgcaagcaaatataataacttgccccctatttgcccccgcttgagatgatacgatattcagccccggagtgactgctccggggtgatcttattcccttgtggcatttgctttgttctttccgatttcgagatacaatatcatctcttgtggcatttgcttttttatcatctcccccatttcttctatcgtgatcagatccatgagttccatcatcttcctatttaatttttccggtattcctaacgctaccgctctcggatagatc

SEQ ID NO: 38 - DNA, 196710 bp, Mediterraneibacter lactaris
  misc_feature (119902)..(119902): n is a, c, g, or t
  misc_feature (120425)..(120425): n is a, c, g, or t
  misc_feature (120756)..(120756): n is a, c, g, or t
agccggaatatcaagagtaaatacacgcccagattttctgggtgctcttgacataccagcatattcttgctattaaataaatatggcttaacagcagaaaactgccgtcaagccacatcaattatcatagaagatctgaatttacagaaaaaatttcacaccgtcaaccaatttcacgaaagagaaagtctatctagaattagcataaaatgctaatttgaaacaggcttctaatttgcgtggattatactagtctctgacgcataccaagtgaaaaattctttgcttttttatttccggtatctgataatccgacaagttgcaataattcgtctattccattttcagaaggaatacccagtatctgatattgttgacggatattatctcttgcgttcatatccagataaatagatggtgtctccacaactgcccccatccgtctcctgcttcttacaatttgcggatccgtatttttaataccataaattctgtaacttccactgtcaggttcctgtaaaccacaaatcaatcgaatcaaagtagtctttcctgctccatttcttccaacaaatccatatatggagcctttgggtatgtgcattgtcaaaccattcaatgccgtaaaatttttgtatcgctttgttaaagcatttgtttcaagtacatattgcatcattcagtcctcctaaaacatctgtataattcttgcaatctccataactacaatctttagcatcactccaccggacatcacataaaaccatatctcacgcatatgctgtgactttgcaattggtgttactattgctgcaataattatgattgcagctccgacacatccaattatgttcggaacactcacaagtgaaaatattcccggatcacagcttccatctatcgtatactgaattgttttatccaatccgtcccttgccgctgcaaagcagcatataacaagaccatatgccaaaacaaacaggctccttctgccccagaaattaatgttgcttctgttactgattgagtatccaacaaacccaaccagcgatacaatcataagtgtagtaactgttgttaccatatttccaaaatagagtttcatccttttttcctcctgttaatacacacttttataccactcagtaactgccttcaaattctgtaaagatactcgttttccaccatttatcatcatatctaacatatcatcctcttcgggcgtacggtcggttttatttgccagtccctttccggcagttttaaccatgacattcatcatgaaacgatatgctccatgaagcttcttcacatcaaagttcccctgtaacgtaaataaaggaatcctctgtggaatagcatttttatccctgacttcttttagctatgattgctttcattcttatctgacctcccataatataaatgacgcagtgcaaaactgtaatattacaatctgcactgcgtcttagcgtctggcttcctttactataaatttttctgcatcaatcaggctttcttctttacactttggacaaaacaaaggaaaatttgttaataccgtatctttccttaatttcaatcttgttttatttccacattttgggcaaagaatccattcctgatgttctgattcatcgttcaaatcccttcaccttttcaacgtatctgcatttcctgtaaaaagtgatccatatgctcttccagtaactttatcacatgacttttgtcttctgctccatcatatatgctgtaaagcaaaaatataggtccataaaaatcaagtgctgtctggctggctttttctgcatcgcccagcattcctgaaaacaaagcttccatataagctaatggtccgcttgcaagataattctgatatagctgtgccatctgtgactctctgtactgttccaatgtcagcatcttacgaaaacagcttgaaaactcttcctctgtccaatgaaggaactgcacctttgtgaactgcttaatcttatcaaatgccgtttctttatactcagctgtaaccttttccaaatcaccctccggcatttcatacagctttactctctcaatatccaattcattcattttttcaataatactgtccaatatctcctgcttgcttttataatgcttatacaatgcagcctttgttactccaagttttgaagcaatatcattcatggatgttcccatatatccactctgtgcaaataacttcaaagcttcttccaatattttttcctttgtgttcttttccttgctttccatgtctatcccctaatttaaatctgtcatcaagttaccttttggttactttaattatagttacctatcggttacttgtcaatagttatgtttggaaaatacaaaagaacatcgctaacttaatcatctacggtttaaacgctgtttgctcttctgaagttgatctgacacaatcttaatatccgttacctgtccgttgacaccatttccatgaattgcaggttaatgaatcattatttctgcatttggcagagcaattcttttttcttttgttcctccagccaataaaaaggctccaaaactggctgccaagcccagacatatcgtagatacatcacacttaacatattgcattgtatcgtaaatagcaaacccggcagttactgaaccacccggactattaatatataactggatatccttttccggatcactggcttcaaggtataacatctgtgcaacaatcaaacttgcggatatatcacttacttcttcacctaaaaatattattctatttttgtccttgaacaatggaagattatcaactgtatattcccatccgttatcctcattcagtaagaactcctgtcccgtggaaactccattctgatacaagcggattttcacttgtttttctatcaatgcatcatttggattttcccatgtctttttgacatgcaaactaccggatttcgcaaaatttcggatattaaggctggtatctcctcgttggagcagaacttcttttccattgatcttgccatcaactggtgccgctacagcctcctgattttcattagccactctatccaccagttttgcctcagcaattttgaatgctccattggcaatctcaaccttaatctgtatatcccctgtatccacataccctgttggtaagtttatctctcgcaacaaataggtttccgttcctgttctattgtttccattttcatcctgtaacagaataggaagttgtgcgattccatatttatccgtcgttacagtttctttttcaacaccgtcctgactaacagcaaaatgaatattttccattccctgtccggtagactcatcaaatttattcagtgtgagtattccttcttcttgataacggttctccaattcaatggtaagtgtctcacctccacgaccaattccgcgtcctgtgaatttaactccactttccggatacaactcccaggaatatacattgtctccttgttcatgggaattacggacattataccagcccgaaaatttcactttcggatctttcggcttatagttgtactcttttaatgtgtatttccagaatgcatctgccttaacactccatgtacagcttgtatgtgtttcatccgtccatgtacccacaatttccatcggagcgccttctgcttgcggaacttctgtatccggtgtctggccttcttctgaaggaagcacaagtttcatgtgttcatgaaatgctggaggctgtggctttccatctaaaagtttttcatccatatctacctggatataataatctttcttaacttcctctattgcttccggcattccaacgaaatccttctttactgtcagataaccgtttttcgctacaatacgtccgtcaatatgccatccatcggacatttcacttttgaaagaataccagtaaatagtaaagaactcaaaaaaatattctacctattgtatctttcatgatagtcactctatttttcttataatgatatttaattatacacctccctgcattttcatataatgtacaaaatttgaaattttttggctctttccttgccaaaagtgttccattgcattagaaaaagaagctattacacgcattcaaactcgtgtaataactcctttttcttacattgcctcgatgattcgaagaatgatcaatccatttcgaactgcaagcatctctgtcacattatcaaagttcattcctgaaatctctacaatctttttcattcgatacgtaacagtacggtaatgcacaaacatctcactggaggtctttttataactctgattattattcatgaaacactctaacgtattgatcaattctttatctctctttttatcgtaatcataaagcatttgcaaagattccggtatataagaccataatttattcttgtccttcatctctgcaaatatatgaaagaaacctaatttagaacaatccacaaccgaacgatttgaatctcctataattttacgaatcacattaatataatcaagtgcctgcttagagtcttcaaaagattccttaatgtcctgatagccgaccacacttttcccaatgccaactacaaaatcaatttctgcatttttttgatctaaatgtttttgcacatctttctgtaaagcttcaattttcttacgaaattcctgtttactttcctgatcctttctcttataaatatagatgatctgattcgtgttacgcatcacacaatctttcggcaatcgatgccaaaacattttttctgctatatcaagtcctctcctttgtttgtctgtaaatttcccttcatcatttttcggaatgacacggaaaataacaacacgtaattcatctgttttttcaatctttaaaatctttgccgcttcttctttttctaaatcggaaagcgacccatttagcagtcgatattctagatctttatgatactgtctggcgatattttcttccatcacacttcccataatgatatggcgtaattcaacaatgatattctcaagtgcaataaaatccaacgtttccacttttttattccgttcggtaagaacaagataaaagggtcgatgaccaaacacatcaattttgtgaatgtactctgattgttctcttttttgatgccaatattgacactttgtaataatattagggacaaatttttccgcatcctctttcatcacaaactctgctggttctttatcattcgaataaagacatacatactcttcatcgtatagagtaatcggattttcaagcataggataaaccaaatcaaagaacttctctacagaatcttttctctctacgagataagtagtgctaccccccccaagctgtcgtgcgttgtcttaaagtaagttaattttgctgtctccatatcgtaaatgcaggttaagacatgcttaatgattccccagtaatgcatcgtcttaggaatttctataaaaattacctgatcttgtgaatagacacagtcgcacttcttttgttgcagatccactttcaagatgacataaagaggttctaagcatgttgcttcgctttctgtagtacacagtactttctgattcataaacttccccttaataactttaaccactaccataggtttccttttttatcaaaaaggtacactaggatctcttcaagctgccttaagctctcattcttcattttatcatggtattatttgggctacaatcgtcaatatttgtacttgtgttgaaataataaaaggggagataaaaattgaacacaaaaaataatcaaagatacagagatatggaaggaatgatgaatgaccttgaggaatacctaagcggggagttacttcaagttgtggaagaatggattaagtacaacggaagcaaatccatttttcttccctatctgcgttacattaaagagcaccaatatgtttatcaagtaacattatccaatcgaaaagcactgccgatcaaaaagagtttccagcctttgttagaacaccttatcttccccctctgccgtacagcacaaataaccgatgaggaagagttactttactataatgtctatttccaatccggaatcaccatggtattaaaatgctggattgaaaacggatgcaaaaaaagcgacgaggaaatgaatgtaattctcatgaattgcgttcctatgatttctgaatgtcaacgaataatagatgtttccgaaaatatttaataattgcagcaaatttttcaatgtattcttctgattatctatatttgcagcttctatagattcggacactccgcctgctccaataatgggaaacatctcgtggttttaatacctatttagctgccattagcactatcagcatactaaaaacaaacatacatacaataaaaccaagcatgcaactaataatccctgatatccatagcacaggatgtatttttcgagtctttcgtgtaataatagaaatcacgataccaataaacgagcataatggtccccaaaatatgacatcaatataggtatacggtgcatgatttgcactgtaaaagtaaagcacaaatgaaaataatgagagtataccaaacacaagtgatgtcgaagccaatattttgttggtagatattttctctttcattgcataaatttctccttcaacttccgattttataaaacacatccgtttcatatagatacttcatcccacacttaccgtacatatacaatatctatactgctgctttcagttagaattgctgtgaagagtttctactttagttaaacgtgtaacccaccacaaaattctcattcgctttttgtgatatttccacatatttcagattacaacacaagttgcttcatcagcccattttctcatctgtggcataacagatgcctccttcccccactgtaatgcaaccaaatcagagtgcttgtaacggttatcgtctgtcttcaccatctggcagcaatgtaaccacatagtaaataattccaaatacagctatgcttcccatcataatgccaatcatctgatttacacttaccacatttccatgaaataccggattgcaatcaagagtgtctcttatcgcttcaaccatttcatccggataatgttttctctccatctccctgaaaactccgtgaagcatatgattcttaatcaatgaagtggcatatgtactcggaagataagacagtgccttctgaagacctgaaccaaaatttgaaatcggcatataagcaccacatataaaaccatatcctgcactgacaattgtacccacagccgaaagctgtccctgtgttgtcaatggaaagctaatgatacttgaaagcgtacttccaaacaggacgagcaatatcatatcaaataaaacccataatacatctgctgcattcatataccagcccattttaagcagatatcccagacataatacaaacgcaagtccattgaccatcaatgaattagctactgttgacagaaaatatcccaaatataattttcccttgctgacaggcgaaacattaaaatccttccttgttccatttgccctgtcctgcaccatagtcagattcacacaaaatgttacagtgatacagctcactgccataagtgatgctgtcagctgtgccgccacggttccattgatgagcttatccgaaatcgtgatcatatccggaatcgccgctgtaaaagaatctctgaaaacctttgcaagaaacgtagcgtacagaacaatcagaatgacgggtgtgatcattgacgtaaacagcatacctttatctttaaaaaacagtttcctgttcctgttcattaatgccaatactgttctcatcaatgctcacctccaagcctttttcctgtgactgcaagaaatacatcatccataccgccttttactacttcataatctgtgaataagtcctgatgctctacaataagtctcgttgcttccttcgtatttcttacttttaactgatatccgtcacgtatttttttatattctctgttcaatgactttatttcatcttcggaaataccataaacagacacgatatcctgtacataatcatttttaagttcaaacggtgtcccttccgctgcaatacttcctttgtcaagaattacaacatacccggcattagcagcctcttccatatagtgtgtagtcagaaatactgtcatattttctgttttctgaagcttctcgataacattccagattaactgccttgtttgcggatcaagccctgtagtaggctcgtcaagaatcaaaatctccggtctgtgcaataatgcacgggcaatgtcaattcttcttctctgccctcccgacagcttaccaacaggtctgtttaaaaactcgtcaaaatccaaaatctcgaccagctcctgtaatctcttatcaaaggcatttcctgtaatgccatacaaagcagccctgctcattaggttttctttcaccgttagcggtttatcaagtacgctatcctgaaatacaacaccaagcatcctttttgtctgtgcaccggctttgtcagtttctattccgtttacctgaaccattccactgtcttttttcagcagtccgcagagaatagaaatggttgtacttttccctgcaccgtttactccaagaaacgcaaacaattctccttttttcacacgaaagctcaaatcacttaccgcttttacttcgccaaagcttttattcagatggctgattttaatgatatctgattccatatttgctccttttgtttcatttgccttgttcttttactcatcatcattttctcacttatcggctaatatttctcaccaatccccttcagtctcttcacaaccccattataccttttttcatccataagtccagcaaatgcgggatttttctctactgcctctaccatgctggaaactataagcttttctgaacggggtgcctgatttccaaggtcaaattgtagaaaccactcatcaattctgtcaaaaaatgcatcgccatgaagcacaagcggaaagaagcaatgctcgcatatatatgtgtaacgctcaagcatgtcaagtgccttagcattttctccatgcatacagtaaatctgagcaccagtaatatatattcctgccgttgtattgggatgaagctcatccatattataaatgtctatacagtcaatggctctggtaattatctgctcggccttcgtaatgtcagccgtatttaacagggctaatggtgctgaatcgcagataagaaacagcagatgctgatacatcgcaacctgatatgcatctatagcaccctgtatattgccaataccctgatagacctgtgccagcagctctgtatcgcggctgattggatgcagcttctcatccattaggtccattaccttcatcggctcaccaagaagcagataacaggaggcttccaatgtgagagcatcctttgcatcattcacgtcctccgaaagacttctaatcctttgtgtaagctcaatacaatgctcataaatgtgtgccggcacatcagaaagtgttgcatgatttaagtaaagaattgccatctgtaacaggaatggaaagcaggaatagtatttcttctccaactctctgcattccgccattgccacctcgaacttttcattagcaaatatattctttagctgacagtaaagctccttaatctgctctctcgtaagttgaggctcgtagcctatcagctcatcaatggacacgttaaaataagtagccagcttaggaagcagcgtaatatccggaaaactcacaccactttcccacttcgacaccgccgccttggaaacaccaacatagctggcaagctcctcctgtgtaattttcttttcatgacgagcagccaaaagctgctttgctatatttatctcagccatattttgccttcctttgcatacacactaacctacttgcatcgtccataaagcactgccgcaagtgccgcaagaattccactaaacataagtatactaagctctccgccaagatttcctgacaggtaaaatgttcccgcagccatggaaaggtagattataatactggagaatattccaatcatagaggacattccctgctttacaactacaacctcattttcccattggtaattagggaagcatatattgataaacattccgaataccgttgaaaatgttaccgaagccaccgcaaatacaatatacaacagggctttcactacatttacacgaagggaaattataaatataacgctgcatataagggaaactggcagcaccatacatatgttaaaaagcatctttcctttataaagagtccttttactaataggcagactttccactacccagagatttcttccctctaaggaaagtgacaccgcacaggtgttgcacatatttacaaccatagcaattccaaatggtacaacatttgaaatgactggcaaaagtgctgccatgtcctttgcatttaccccatcaacattagaaatcagcttatcaacgccccaaaatgcactggcaaccgaggcaataagagccaatataagccccattcctatattaagcatatatacagatgaggaagtaaatctctttgcttccttgtacgccagtgcagtaagcaccgagcttttctttaactgaccaaccttatagttagatgatgcctgatgtgacttaagtgcagaatttatctttccataaaactttgcacaaaaacctaaaaataccgcatatacagctaccgaaaatccaataaataaaagaatatactgggcatttccatagacaacgccattgtcaaaccacaatgacactggatatattttatgaattattccagaaataaatgcacccatatcagtaagcattgcaagcatcatggcttcatcagccatagcattttgattgagccagaagcttccaaacattatgcccaaaaacaaaatcaccgtaataataagctgaactgccgctttgtgtttaaagcctgcgccaatggctaatattgccattcccacagtggcggctattgtcataggtagcagtggtgcgaacaatattccaaggaaccagaaaaccacggttcctgcattaaagccattccacatttcatagcccactgccattggcaccattactaccaccgcaaatgcaagattgttaatatacatagaaagaaacttcgacgcaataattgtcctcgtctttataggaaatgctgtaagcatatcataatctcttgtgctaaaaagaattccattggtttttaaaaatgtgaagaacaaaataacaatagaggtaatcataagtgcatagccaggaaccacataggacatcccaagatagctgtagccatatgaaattgcaaagcagtaacctgccagaacaattgcgaggaaaatgtataaaacacccattgctatgtatctgtatttaacctttttgtttctttcatttctaatagttcctaatctgaacctgtttagaaactctgttttaagaagtgataaaagattatttgtcatccgtcgtcacctccataaatagatcctccaaggactgattcttaactacctcttccatatttcctgaagtaacaagcttaccatccttaataattgcaatcttattgcaaagcttctgagccacctcaagcacatgagtagaaaagaatattgcacttccctgtctgcacagctccttcataatattttttaaatcaagtgcagccttaggatcaagtccaacaaatggttcatcaagaaccaacagctttggctcatgaactaacgcagaaataatagccaccttctgcttcataccatgggaataagacgaaatcaaatcgccaagattctctgtaattccaaaaagatctccataagttttaattctttcctgtctgacactctgttcaatcccgaatatatctgcaacaaaattaagatactgaatacctgtaagaaattcatatatatctggattatctggaatatatgccgttatactcttacattccataggctccttttttaccgaatgtccatcaatataaatctctccctcagtaaattctaacactcccactaccgatttgatagtagtactcttacctgcaccattgtgtccaataaagccgtagatatctccagcctccaccgtaatgcataaattatcaaccgcctttttattacccttgtaggtctttgaaaaattcttgatttctaatatattcatataatctactcctttgattaagtgtttatgattatattatactcacttcacccagactcacaatggatttgacgttgatttttgtttataaagttaacttgtggttgattgaatgtaagcacttagtttttgggtaactagtataattcactttaaataacaaaccaaatctgagggtacatctaacgaagcaattgctgacaaactggatattaaagagttattgaaagcaatcgaaggaagtagcaagagctatgaggaaatctgacagatggcttttccttacctattatccaccttctccggatacatatcatgatttgccatacggttaaatgccacatcttcccacttagttcctggctttccataattgcagtatggatcaatggagattccgccacgaggtgtgaatttgccccacacttcaatatattttggttccatcaacttaatcaaatccttcataatcacgttcacgcaatcctcgtgaaaatcgccatgattacggaaagaaaacaggtacagctttaagctcttgctttccaccattctctcgcctgggacatacgaaataataatgtttgcgaaatcaggctgtcctgtaattggacagagacttgtgaattccggacagttaaacttcacgaaatagtcattttctggatgtttgtttacaaatgtttcaagcaggtcagggttgtaatctgtctcgtaattattctgctggttgcctaataatgttaaattctctttttctctcatagctttctccaatttctattttattgcagggtcacttaccccatttgctgcaaatgcagccgctctgtcgatacaggttccacatttgccgcaaggctcatctttcccttcatagcaggaccaggtaagcccgtatggtacgttaagatctaagcccatcttcaccacctccgccttagtcatattcacaaatggcgcctccacctttaactgatgtcctgagccctcaaaaatcgcctgattcatagcatcattaaacaccggtgaacagtctgggtaggcaaaaccggcggaatcatctgcatgtgcgccataaagaatcactctgcagtccttgcttagtgcaatgcttgccgccgatgaaagaaacagtccatttcgaaatggcacataggtgcttacaggcttttcgccctccgtcttttcaatctgcttggcatagctctcctctggaatttcctctgtagactgctgcaataaagagcagttgctatattgaaaaatcttactcaggtccaagaataactgctcaactccgtaaaatgcagaaacagcctttgccgcctgaatttctttatcgtgcttctgtccataagaaactgacagagcaattacattgtcctttccatatcggctcactgccaatgccagtgccgtagtggaatccacgccaccacttgataatactaatgctttcataacttcctctcctatcttagatacatttgtaatgctgcatcgtctttaaaacttcctcttagctctacagtcattgttctcgtgttgtttttcttaattcctcttgccgacacacaactgtgatacccttcaagcactacagcaacatcttcacttcctgttatctctgccataatatccgcaatatcctgaccaattctttcctgtagctgcagtcttcttccaaccatatcgcatattcttgcaatttttgataagcctataaccttcccattaggaatgtacgcaactgtggccttcatgtcatacataagtgccatatggtgctcgcagtaagaaaacagatcgatgtccttcataactacaacctttgaagcatcaagctcctcaattccatcctcaaatgtcttatcaaacatctgcgcaatttcatgattggagtaattcatcccaagaaagacctcctcgtacatcttcgcgactcgctttggtgtatcctttaagccctccctctcggggtcgtcgcccaacgcaacaagaatccctctaatatgctcctcaatcgctttcgtatctatcattatacgcccctttcctctgggttccagattaccttgtgcatctgaatctgaagacgcacgtcattcatccttttactggtcatgaaattcacgatttccactggctcaattgaaccaaatactggacttatgaatacctggcacctttctgtcagatgaaattttccaattattttctctgcacattccaaatctttgacactgcccgaaacaaacttgactgtgtcctgctttcttagagcttccatattggagagaatcattttctcctcacagccgctggatggcagcttgtaatccatagtaaggctaagtttttcttttgaaaatgcattggcaaggggagcaatatcaacagccccattagtttctatctctactctgatgtccgatttattcaataacttttctactaaacttctaatatccttctgtaataaaggctctccccctgtcagcgtcacatttttaatacctgtctcactgacatattcgcaaatatcatccggcgaaagctcctcataatcacaagctggctcattggcccactttgtgtcacagtaggagcagtttaagttacagcccttgaatctgataaacaccgccaattctccggctcttcttccctctccattaatacttataaatttctcaacaactttcatattagtttctttcctttattcttcgtatgctgccaggttattaggtgtctcatatacttccactctgtggattggaaagcctttttcactcatcagctcatagaaatattttgaaaaatgctccgcagtaggtctgaaaccaacttcaatcatacgaaactcttccgcttgtaaagcagcaattgtcgcacctttaagagaacctttttcataaatcaagctgtggtcaaaatcatcacagatatcctccaaggcattttttaaatcagagaaatccacaagcattcctcttgtctgcccttcatcctttaactggtctgctgctatttcaacaacaactctccaacggtgtccatgaagattcctgcattttccgttataccctttaagaaaatgtgcagaatcaaagctactctcggtttttaaataatacatactaatatctcctatataatctggtaattataaaaacagaattgcttagaaaagaacgtgccccactatgagtacatatagaaagccctgtaaatgtatacacacctacagggctaaattacataaaaagtcttcttagcagccctggttttatttaacgacaggatggtacaaacgaactgtcgtgcatttttatgcgatatatctattataagtattttttttgatatgtcaatcttaaattgctctactgttatttttcccccagaagctgcacctttaccacgttcattatacgtgccgggtatgtttcctggatttctcctgcaaatgttattgaaaccatatcatttactgccaagtcggacacttcaatctctgttccgctccactccaaagcagtttcttccgcaagtaaaaacacaaactcaccacggtagtttatgtcatttgcctcaattcccttaacagtaaaattcttatcgttaatctgggtaattgttgcatagaaggtctctgtttcctccttcgtccatgaagttttattcttatccactgccactttatagcctatgaaaaatgatgcaactgcgactactgccaaaagaatgcacacacccgcaatgcaggcttttcttgacttccccatctattattcctcctttttccctagaagaatttcccttacctttctggttcgtacaccgcatcataatatccgtaaaataacgccagcttttcccacagaagctcctgctcctcgtctgtatgaatgtccaccggtgtcccgtacaaatcgaaaatgtaatttttataatttctgcttttatccattgaaaaccttcgaaaatacattttgctatttatattgtgagtatatatactatacttcgatttgtaaagtggaaatttgagttctgcgatgatagcggtttatctcctacaaaaatagtggaggttggtttctacggagctcttttgtttcttcatattcctggcaaagatcttccttatttacatataatcggatcatatccggctttactgctatttttccttttcccgtaactttaattgttctcatcatctttgctcttcctttcattctcataatattcatatccattgattaaaagctctatcatcttctttgtcatctgaatatacttaccaaacggattaatcacaatttttatcctgctgaatataatactggtcggattgctgcctcaatcatctgatttgcctgtgtctcatccacttcatctgaataagtatccacgctcctgccaagtacatgatcaaattcatcaagaacatccgtcatcattcccttatcaatccgacttttacactctgcaatcagcacagccgggattccataaaatgcttctgcaatacttcctgtaatggctccaagcgtatctgtatctccaccaagtgataccgcattacgcactgcgtcctcaaaatctttggattccagaaatgcgatgattgcctccggtaccgttctctgacaagtctcatccatgtgatatcctggtctgatctcatcaagtgttctatcaaggttatagtgaaactccttctctatatactctttgatctcttcctttgaagagccattccttgccatgtatattgcacttgcagttgcctctgcaccctttataccttccggatgattatgtgtcacattcgctgtcgctcttgctacctctcttgttctttccagcgaatcataaagccctcctgccgctgatactctcatggctgaaccattcccataacttccgtatggcttaggatttctttctctaagccaatacctgaatctcccaccataaccgacatatggatatcttttcccccaatcctgcatgttagttactacagcctcttcaatttcctttactgtagcttgcggtccaactgcaagaagagcttctccaactgctattgtcataacagaatcatctgtaaagtcacagcctttagtaaacagatcgaattcctttgttttatctcctctatcaaactcaaatgggcttcctataatatctcctaaaatcgctccgtacatatatgcctccaatccccggattactccggcacctctctttctctgttacaatatgagtataattgaatggcatctttatatggtcgctgtcccggcgacacttttaagataaaaaacaaacgccgatactatgtgagtaccgacgtaatatttactaatcaatatttacttatgagcatttatactccaagaatttcattcgtatacttaaataatgtcacattcaactgcataatatcatactgcttatcaatgatagctttctgtacaatcaaatcaaccttgctgcttgggctgaatgcccagtccgctctggcaagcaagtcttttgactgttccaaatcaagctgcagtgcaatacagagtgccattacagttttcttctttggatgataattctggtcacattgaatcttggaaaaatgctttctgtcaaggtttgcccgtttccacacatccttattgtcaagatgtgcttcgtcgatcagttcaaataatttgtcatgaaatgaaacgccaatatttgcaagctggtcttccaaagaaatgtctgctgacagcatacaaggctctgctaaccctgtatcttcctcaattggatagttatcttctgcctctctttgaagcatctcctcatagaacgcttcctctgacaattctctcatgcgagcaccgcttctgctttgcactgaatattcttttttatgactttccctgacataattagcatctatgtaggaatcaatatcacccacaatctgaccggaaagctgaaaagaccttttatcaaacactgccagtatgatttcaatctcattttcagtaagaaactggctgaatactgacacagcaatctgcaatgctttgtccttcgggaatccatatactcctgtcgaaatcagtggaaatgctatactctcacactcaagttccaatgttttctgtaatgattttcgataacaattctcaaggatttcaaattcatgatgctttccatctgtccataccggtcctactgtatgaataatatattttgcctttagattatatgcaccggtaacagcaatatcacctcttgcaattttgccaatacctgctctttctgcgagaagcttttcttttcctgctgcctcatatattgctaagtccgtgccacttgcacatatcggatttggattagcagtatttacgattacatctgcttttacctttgttatatcgtttcggacaatcttaaatggcattgtagcacctccctacctattttccttaatatatatacctcattactcagcgtacttttcgatccaattctcgccattatattcatcaatctgttttactaatctcgtaagataatcttgtaacccgctatcctcttcacttgcataccacacatttgcccgtccaaatccataagcccaaccacttgattttcttggtacttcccattgaacctttcttgatctgatgcctgcaggaagcagtacacaatcagacgattttgccattgcattgtaaaattgtatatcttccggagcaaacactgcctcttgataatgtctgaaaactgtagcatgtttataccatcccacgaccgtcgtaaacttatgtgccggatgctttgcacagtacacaacaagcacatcatctacggattcttctttttttaatagctcacagcctgcaatattctcaatccgcatttgattaacatctttaccattatgtgactatgttacaaaaaagtattctcatcatatcaaccttcttttccctttgaaaatggactcaagtcgataaacagtttcttcaatccgctattatagattcattggctgctgtagtcataatcacaaatcgtcgttcattctcaaaccaatcacataacgtacctttacagtagtcataactgttcaggtacgttatttcatttcaaatgatacgctacacagtttccggaaagaggatctcaaaggttgtgcctccattagaattatccagcacacggatcgctccatcatggactctcacgatctcacggaccagcgccagtccaagacctacgccacccagagcccggctgcgggatttgtccacccggaaaaatggttcaaagactcgttctttcatatctgcaggaattccgcttccgttatccataacctgtatacagatctgttctttatcactgcaaaccgtaacctgtaccttaccgccgggattgttatacttgatggcattttccaccaggttatatacgacccgatagatcaggatatcacttcccatcatcgttactgcatcgcaaacactttcgagaataacatttttttcctcggcaagaggatcaagatctgccagcacttcttcaaccagtgcatccacttcaattttttcatctctggccacggtctgcaattcactcatatccaacagtgtcttcaccatcttgctgagacgttcgttctgatccgttaccatctgtattgttttctcggtacaggcatctgtcgcaggatgcccggttgtatgatataggtccagttgtgcctgcatcactgcaagaggtgtgcgcagctcatgggctgcattggctgtgaattgacgctgcatctcaaaggattctgaaagacgatccagcattttattataagaaatgctaagctgattcagttctttcactttattttcttcgattctggaatctgacaggtttctggcttccacttcttctattttttcagaaaactctttcagtggttttaaagacctgccactgaaataataagtggcaactcctccaagaatcgccagaaagatggaaaaaaacaggcttttctttttataatccgctttattattgtatacctgtacagaaaaatcattggcgaagtcatcccatttgtcgtcgggtatactgatatagatttcgttttgatggctgtcgtcaccatctgtattctgggcatctacagtttcctggagagaatccatgtaatatactccacttccgtagacaaacatggtaaggcatccgcagatgatcgcaataaaaagagttgtgatcagggtaagtctccactgtaatgacaattttttcatttttccttcctctccagccgatatccttcaccgatcttgttcacaatgggatcataactaagtactgccttcagttttcttctcagagaagacacatgtacccgaatggaaccgctgaaactgtctacagacgcgtcccatacatgttcaataagttcttcctgacttacgggacgcccctgattcagcaacatatattccagaatcccattttctttacgcgtcagagacacaggttcaccattggcacaggcttccctcttcttcgtgtcgaatctgatatctccataactaagacatacatccttttgtataaactttcgtctcgtcaggcttcgaatcctggcttccagctcctggagatgaaaaggcttctccatataatcgtttgcacctgcatccaggccctctaccttatcggcaatctggcttctggcagaaagaatcagcacctttgtctcctcgtttttcatacgaagttccctcagaatatccattccatccatccccggcaagttcagatccagtacgatcagatcgtattcttccgtcagaacataatccagggcttcttcaccatcataacaggtatcaacctcatacccggcactatataggctctttgctacagtgttgcataattctttttcatcttccacaattaataatctcaaaatattttttctccattttcgtttcttaacagaaattttacaccctctattgtataatagccaagtcaacaggtcaacaaagtcttatgcagtgaagcgttagttactgttcactcgtacctcgttccagtaacgattcgcaggctcatctgaaattgtgcttcgcaaaagaagcctgctcactcctgaatcatgttcttacgcagtctgacagcaagtgtctggctgctgtgtgaactgtaacatgcgttatccaaaacaaagggtttgctggcggacagttataaaattatacagtagaaggaggtatccgtatcttgaattacagacgtatcacacagattgtactacctgcccttggagtgttcatgatcgtattcggagcatacagaggcgaggcagctgttgtacttgccaaggcaataaaattatgtatggagtgtgtaggaattggataaaaaaacaagtatcatctcaaaacaaatagcacgatttcgtggctgggttcaggcagcagccacattgcttacaaatatacatctgccgaatttcttcaaaggaaaaatataccagggtaatgggaaaacggtatgtgttcccggtttgaactgttactcatgccctgccgcttcaggagcctgtcccatcggtgcttttcaggcagtggttgggtcttcaaaattcaaattttcctattacatcacgggatttatcatcttacttggtgtaatcttaggtcgatttatatgcggtttcctctgtcccttcggatggttccaggatctgctgcacaagataccaggcaaaaagttctctacacaaaagctgaaaccactgcgttatctgaaatacctgattcttctggtattcgtaatccttttgccaatgttggtcaccaattcgattggaatgggcgatcccttcttctgcaaatacatatgccctcagggtgtattggaaggtgccatcccactttctcttggcaatgcagctatccggtcggcacttggcaaactatttacttttaaaagcatcatccttattacggttgtggtgctaagcattctgttttacagacctttctgcaaatggatctgcccgctgggagcaatatattctttatttaacaaaatatcatttttagggattaaaatcgaaaatgataaatgtgtcggttgccaacagtgtacaaaagcgtgtaagatggacgtaaatgtgctcaagacacccaaccatccggaatgtatccgttgcggagcctgcatgaaggtatgtccaaaggatgcaatccactatcaatttatggggaaagacatgtgcatacacaaacataaagaaacaaagtaaagtttgtattaactgattaactttttttaaagatgtcggggtcaaaagcccccgactttgatgcctacggattgctccgtgctacgcactcccacaatcctacccagtattcgcatatcgtgggattatcatcccacttttatgctcatatcggggcgggtcctaaggtctttcacccacctatgagcaagctcatgtgggcttagaccttttgaccctggcatctattaaaatagaatagttacaaaataacatatataaaaggagattttatcatgaaaacaagaaaaaatatcatcactgtacttactctttgtgcagctttatcacttaccgcatgtacaggcaaggaaacaaaagacactactgacacacagactacagatgcagcatcgacttcagaatccagttctgagatcaacgatttattccagcaggaaaaccagctgtttgcagatcatcaggatgaatggaacaaagcatttgctatggcaaacaaaagctctgcagacccaagcggaaactatggggattaccttgctgatcttgtagactccaacaaagatgaatttacagaggaagaacttgaagttctccataaagatatcgaaactattcgtagaatcgaagaaaaaattgcagcactggaaagtgcaggaaccccggaaacagcagctgactcttctgatgcagataccccattcaagaacttcagtgccaccgactatgacggaaataaagtagacgactctctgttttccaacaatgcggtaactgttctgaatttctggtttaccggttgtaaaccgtgtgttggtgaattatccaaactgaataaaatgaacgaagccatcaaatccatgggtggtgaagttgttggtatcaatacagaaacctttgatggaaatgaatctgcaattgaggaagcaaaaaaggtcctgaaaagccagggagcaaaatatcgtaacctttccctcacctccgattctgatgcaggaaaatatgcttccaatatcatggcatttcctaccactgttctggtagaccggaacggaaatatcattggagagcagttcatgggtggtgttgatgatcagaaaaattatgatgcactgatgaaacagatcaaggcagtgattgacgcagattctgcaaaataatcttagccactatcgcggcagtcgccaaggtctcgtgcaagcacggactttggctcgttgctcgcgtacctaatcaaaaagcttcaacaccgttctctttaaatttgttaagacaacattttaccacactgattccaatatccagtttgtcagcagtttatttaagtaagatttatcatcatctgttaaagaaatagttttaattgtattaggcataattggcacctccgatggttcaattatactacaataggaatgtgaattaaaatagtttgttatttaaagtggattatactaggtattgtaccaaaaaacggacttattcctcttcctcgaaaaagaagatatcctctacagtacgttcaaacactttcgctatatccatagcaagtttcaatgacggattatatttcccattttccaaatttccaattgtctcccggcggacccccaccaactttgcaagttccgcctgttgcatattattttccttgcggagttcatgcagctttgtttttagtataggcatatcaatcactcgtcctttcttccaaccagaataaaatgccagtaagaagttgaaccactccgataacgaacggatataacttggctatatttactaccatatttccaagaactaccgagcctacacctataatcaaaaacaatgaaactgtgatatcaagcgtcattgcctttgcttttgatatgtgtagaattgacatctcatcatcagcatccgcttttacaaataaagcaatgcatgaagttataatcgccataattaaagcaacgatacacagcacttttgtaacaatgttatttggcaacagatttatgatggcgtatatcagccacacaaatccattcagggtatatcgtaaattatagtgttctgacaaactcatcggttcttttttattcataatttccatctcctttatgtgatatatttcgctcttatattacaaaaataccactcttatattctcttgtcaatataaatgtgcgaaatacaccacacgattttaaataaaaaaagatgcctaccactagaaaagacacctctctttatccgacataggtatttacatctattttaataattcctgttctatactaaggacatctggaaaaatcagcttcgctccctttctctgcaatgctaaaacttttcccgctttatcctttaactccttttccgatctaccatcaacacgaaccggtatattggcaacagagtccagatactcatttttcatatatttttctgtaatcgggcacatatttccatttcttctcctaatggtgtagtcagcataagactccctccatctgcttataagcttataattataacagtttccaaagttctgtgcttgttccacttctgatttattgcacctgatacatctcccgcagttgttctattcgcaaccgtatgccccaagtaatagaatttttaatgaacacctacctcaacaatcgccccggttcgtgttctccgtttttatattcaaaaaagaattccgagtattgatctgtctcaaatatttccattaattctctcatatcccaaatgaagtttgcatcatcaagatcttttctgtccagccagaatacgtgcccttcctctgaggatctgagtgttcccgaaaacttattggttttatacagtagaacaatgtatctcgttccatcatcctgtatccagtccttaaatccacatggttgtggctcaaaaatatctaatccggtttcttcttttatctctcttattacagaatctctgaagctttctccctgctctatatgtccacctggaaagactaatccattggtatactttgttccttttttctcttcaacaagaatcctgttttcatcataaatgaagcacatatttgtaagttctacttcttgtgttctgttcatatttccacctgttccaataccatttaaatggcacaaatttatcgttggtttttctattttacatagtatacataatttccttttctgggggcagatgctggtgccggtacggcagcatacccgattgcacaatgtccgattccttcataatcaccatcaattcccaaatccgagagaatcttttttccaaaatcagattcaaattcttcctttgctctgtgaatccaaatacttccaagaccaagactttctgctgcattcatgagattccccataacaagagagccatcgtatttataggttgggattgttttatcggcaagaacaatcagaattaccggtgctccgtaaaatggatccatatcagttcccataatctttgcattctcagtcgctatctgatctcttaattccttattcgtaactgcaataataatcggactctgctttcctcttcctgttggagcataagtgccggcctttacaatggcctcaatatcttccgcagataccattttctttttatcaaaatttctacaacttcttctggcttccattacctttaatgtctcattcatctcttataacctcttttcaccaaattatttctgatattctaatgtctgtctgctgcttatccttccaataatttacagctttttcaaactcttcatgtgttacaaaaatcacctccactatttatatgaatctcttcttttcatcagccacttctgatctatgcatttcacttcaccatcaaaacgaatatgaagatgtactccgccagatcttggactaattttttctacgattccatttccaaatcggggatgagcaacttcatctccaattttataatggataatttcattcttttgcttctgtgctttttgcagacgttgataggtatcccggattggcaccgtcttatcatggatccgattttttaataccttatcgtagtcgtgatcccttagtgcttctcctgccttataataaggagtcggaactgcccctataagagagcagcaatacttccacgcactcccgtgcgttcctgtctgccattgatatttttcaggtattgacatattgtactgcatataatgtgcatattcatgcttaaataaatcgatacgatcttctttagacagtggattttttactccatatgcaatgaagaacagtgaaaaatgaaaatgctcctcgttatgagcactttgccgggtataagatcctaaagaatcggtatcaaatccaaatgtcaccggtacttttgctccgttcagatgaaatctccgatccagtccttcatacaaattctttattaacgctgttaaaaccggaatttctttctgcaacctctgccgcaggaactggtcttctcgatcataataagtcattctttaatatttcctcctgattgtgaaatatgaaacagatatcggattcctttagcaagtcttttcccctcatcagcaaaatgtcctccggcattccactccaaaaacacccgttctgccattggatccttttccaatttctttttctgttcccttgtccggtctcctactcttgccatcactttattctttgtcttctcttcccggcctccaaggctcagataaatcttacatttactgtgaagagtatgttcttccacataaatatcccagtcctgaaaccataaagatcctgaacaacagattatgcccgaaaagcaatcacactcatatgctgcccacaaagcaaacagccctgcaagagagtatcccatcagccagcgttcccgtcgttctgtatcaaatgtctgatcaatatatggcatgcattcttctgtaagccatctcaatgtctctgcaccctgtccggaaaatctttctgttccaaacatagcaggtgcttcccacggtgaaaaatcccgattccagtcttccacctgaaatgcaacaagcataaaattttgtcccggggctatttccatcaaagactctctcagatgttctacttcatttccccgatgcggatacattccccagaaaatgactggaccaccggttccattctgtgagatatataattttctcccggatagtaatctttcatttatcggtatcaccatcttcacctgcctgctacaatatttatgtatcatgatgtcaggggcaaaaggtctgaaaccacgtgtgcttgcacacttgtggtagaatgaccttgagacccgccccgatatgagcataaaagtggggcgtaagcaccatgatatgcgaatagcgggtaggattgtgggagtgcgtagcacgaaacaatccgttggcatcattgttggggacttttgaccccaacatctttataattactcatcatattttcttctactgtaaactgagcatctctctgagtttttccaccagtccataatctgccggaagccagtccaccgtatgcaaagtctctttcgccagccattttgctgcctcatgctctttcagtacaagatctccttttttaatcttacagataaagcagtccattgataaatgaaactttggataatcatactctacagtatcgaataattctttcacttcgacctctgtatccagttcttccatgatttctcttacaactgcttcttccggtgtctcaccttgctcaatctttccacctggaaattcccatccgtctttaaattctccatatccacgctgcgttgcaaaaactttaccatcttcgatgataatccctgctactactctgactgtcttcatgctatctctctcttatctttcgttcaattaatacaagtagtaaaaacttcgttatttctaaatccgtttttaatcaaatattaccatgggattcaaatcaacaggactattccattcgattccaaacctgttttttagaatagttttctttgcctcttgacactccccacagctaaagcagggggattcttgcttcaaccactactgcattggctgataccattcggtatctcaatgtcttacacagtgtccacaagctagattatactgttcccgtatgccctacggtgcagttcatatgttctattgttttatgtttactatgctgactgcatttgcagtcctttatccaatatgttgatacttgcgttggtatccctatcatgctttgtatggcactccggacactcccatttacggattgcaagattctttacaagtggatttttaaatccacaacaggaacatgtttggctgcttgggtacattgtaggcacttttacaatgtcattcccataccaaatagatttataggacaacatatcaaaaaacttagaccacgatgcagaacctatatgctgtgctaatttgtgattacgcatcatattttttacttttaaatcctctatgcagatagtttggttttctcgaatcagcatagtggattgtttttgtaaaaaatcgtttctctgattcgtaatcttttcatgtactaaggcaaccttaacacgctgtttattgcgattggttgaacctttttctttgcgtgacaatttccgttgttcacgtatgagcttacgcattgatttttcaaggtatttagggttgtatactacttttccgttactgtcggaatagaactctttaatccccacatcaatgccaatcttaccacctttattactcattggctgtggttcaaatttcacattcagaacagcaaaatatttattcgtcggtgtacgctcaatggttatgttattgattttctccacccccatagtttgacggattttcacaaatcctaacttgggaagttttatatattttcccacaatgcggatgttatcgccctgattgattgttctgtaggactggtggtgattatgtttacttttaaatgtcggatgggatgcacgtttctgaaagaagtttacaaaacctctgtcaaggtcacgcaaggactgttgtaaagcaatagaatctaccgctttaagaaatgcaaaaccatcacttttctttaagtctgtcagcattgcagaagtctgtgaatagccaattttattgccattctgataggcttcattacgcatagcaagacctttgttgtagatgagtctgcaacaacctaatgtttgattgatgatattttgctgttctctgtttgggtagattctaaatttaacacctttttgcattatcctaatttatccttttgtctttgcgatgttttctgattttcgatatattgcttgattacatcaagcggagcaccaccaacagtcgatacaaaatagctgtttgtccacagtgatggtatttttgttttcaatgacggatcttcacttctcaaaactttggaagtatatccttttaatgatttaactgctttgtgaataccaaactgagggtctacttccatgagtatgtgtacatggtccggcatgatttccatttccattaggacaccaaacaacatggtatttacaagaatagactacattgttattggatttatatgtaatattcatatatgtattatgggtcatttttaaatctaatacaaggatattttgttccatcttcaattacttgcgtaaattcgatggaagtgtcttatatccccatagctaaagcaaggggttttacgacacactggataaattaatcctatcttaaaaatgccaaaatttcaacgcaaaagaaagtcaatcagattccgggaatttataaacagccagctcttcggcttatttcctgaactccaccgcatgcttccgtttccatttcgggaacagattcctctgacagatataattttctctttctttgataccgaccgcatggaaaaaggttttccagagatcggtatatgtatctgtatattcttctgtctttcgcagtgtatcgaactcttcatctgtcagataacgcaggtaatttgtcccgtctttcggatggatacatgcaatcttccgtttatcatcaatgatcatccagtgttctgagggcatacgatccgcaaaatgtctgccaaccagcatgatcacatcacttttcggttctaaatggctgacgtaaacgcttccatttaaagactcaaatcgtgcaaattcccggaaatgatgacattcgtttccaacttttctccgcagttctacgatccgcatcacagatggattcgcatattgctccaatacactgcttcctgtggcaaatccaactcgcaggaactgataaattgcctgaagtgcatcttcctcatcagacaatgatgcataatacacatacagataggcttcatccgagatatccctgcggatggaccggatcactttttctgctttggaagtatctccattcacatgaatatattcatcaaagattgtctgctgaaataccggttcttttcttaactgtatcaggtcgtgtccgacctgcagtgccgctgaccatgcatcataaatacaggtcagaatatcttcaagccggtctttgcaagtatatattttcataatcttctgctcctatcggattccaaaatctgccagggtcatctgtgaaaatgattcattggcatgctgagtctcccacaattcttttttatctgtatgaaccagttgccggatgatataattttcttcaatcggcgtatggtacatctgctttccctggcaggtaataaaataatgggctctctttaatactactcccattttctttaagctggggaaatccagtcttccataacgtcttgcatttacgatccggccggctgactttggaccaatcccgggaacacgaagcaggacggcatagtctgcagtccccacttccacagggaattgatccagatgccgcaatgcccagtcacactttggatctaccagttcattgaaatccggcttttccggggacagcagttctcctgcctgaaatccgtaaaaccgaagaagccagtctgcctgatataaccggtgttcacgcagaagaggcggaggtgtaccgatctgcggtaatactgcctcttcatttaacgggatatatgctgaataaaagacacgcttcaggtcaaacccctgataaagtgcctgcgttgtctgcaatagtgtataatcgctttcaccggtagctcctatgatcatctgagtactctgacctgccggagcaaagctacgctttaactttgacatatcccgtggtgccaactgggtggcattctcccatcccagtacatattctgatgccggtctctttccgttcttcaatgagaaaggtagttcattttccgatagcgaaacaaggggaggttcttctgacactgtattccccatactcaggctttttctgaatctctgtctggaatttgccgaaaaaatcccgtgatctaaatatcggttcccgagacttcgttccatatgagctgtcttaccgattgccatccggtgagaggcgatcgtactttgcacttttcccatgggattcagaatggtctgcatcgttttgttgggtgccagtgtacgaagtcctgcttctgtaggcagttctaaattcacactgatacggtctgcaagataaccggccgctgcgagcagttcatcagaagcaccgggaatcgtctttacatggatataaccattaaaatggtactttgtccgaagcaataacaacgtctcacacattttctccatcgtataagagggattcttcagaacaccggaactcaggaacagtccctcaatataattacgcttataaaattcgatggtcagctcacagatctcttccggtgtaaaggttgctcttttgacatcattactggcacggttgatgcagtacttgcagtcataagcacaatgattcgtcatcaggatcttgagcagagaaatacatcttccgtctgccgcaaagctatgacagatgccacatgcttcagcattgccgagttctcctttctttccccggcggcttgaaccgctggatgtgcatgcgacatcatatttggctgcatctgcgagaatctgcagtttttcctgtattgtataattgctatttataaattctatactcatagtcctattatacaaacatatgtttcgcaatgcaagtcgttttagaacaaatgttctttttattgtcttatttctttattatatcttttgtacattaatatctttacatttttcataagcaaaaattgctgcacccagagccccacaaagctgtgcctcatcacagatatagagcttcgctccgagcttttcttccagtgcctggatgattccctgatttttggcgacaccaccggtcatcatatattcacccggattattttttccaagccttgcggcaagtgcccctactttggatgcgacagatacattcagtccgtgaataatatctgacacctctttattctgggcaaccagggatacaacctctgattctgcaaaaactgtacacatacttgagataactacattttctttccaatccaatccttttacgctcatttcttccaaagaaagtccgagtgtccttgccatcatctcaaggaaacgtcctgttccggcagcacatttatcattcatcaggaaatttttaactgcaccatgttcatcaatactgattgctttgatatcctgtcctccgatatcgatcaccgtccgtacatccggattaagataatttgctccttttgcatgacaggtgatctcagtaatgctgtcatccccgctgtctatataggcacgaccgtaaccggtggtaacgatccgcacgagatcctcttttttgataccggctttttctattgcctgatccagactcttctctgcactcatcattgctccgccacctgtaggaatgatcatagtggatttgattttcccgtcctgatccagaataacaacgtctgtactggtagaaccactgtcgattccggctacatagtaaactcctgattccattttttctctttcctccctgctgatttccttttcaggattcatatcttctgacccttcgatcgtttctgaaaatgcctggattctggttgaaagctgtccggcactctgacttgtaaaatctgtctcgatcttaaggagtggcacctggatgttctttttaatacttgcgtattcaaatccataataatcacagaacttgatcgtatggtaaataattccttttaaatccgggtctaaataaagctggtttcttcttgtattgttattcatccgaaagcatggcatctgtccaagcagtgcatctgcatatgcaagcaacagcctgtcttcttccatttcctgcatttcttcaggaagaactgccaggtttcgcccaccggtacaggtcagatttcttacatccatatgaagattgtcccggatcattttttcaaggattccactgacacgcactccaagtacaccaatataagaagttctgctcgcagatgtctttgcgaaagccttcaggaaaagtgtccggtcaaattttttcccggagtatttttcatatgcctctttcagacgttggatcgaaccggcaaatttaactttttcacattcattatcttcatgaggaagatccagcatatataagaagttacattttccggtattttttacaatatcgtacacgcgacgcatggaatcacagcagtttacaagtacaagctgatcggctttcccctccaggactgcctggatcactgattttccaaaaccgcataaatttgcatgtgcaatctgatcagactgttcaaaattttccggcatttcctccagaaccgcacattcctcaccgaatccccggaacagttctaccggggtatatttacaaacataatgtatcatgcgattttccctccctgttctcttccagcatttccacgaatgcctgaagtcttgtagaaacctgtccatcacttgtattggcaggattacatccatcgccatccaggatcatggtcggaagtcctgctgcttccagtgaacttttgatcagaccggaggctccgatcgttcctttgcatccccagtgggcaaataagattccaccatctgcatttgttattttggcaagacgttctgccatttcaattctcttatctaccgctccgttataaatacagttgaccattttcgctgccatcgcctcatagggatctgaagcatccatcatctgaaatccgtctgcgacaaaatcacaggcactgatgtggattgtatcactgtaattgaaaacttccattaccggttcctgcaaaaatggcataatatgcatccacagaacatgaagtcctacccctttcggagctttctttacatcttccagtaacagttccgtatatttgacagacgcttctgatcccgccagcagatgacacataaagatcgcataaagttcattcgtcatggaggaaacaggatcatgatctttccgtaatgcaagctgcctctgataattgacggctgctttccggctatttgaaactgccttctgcactgcctcttcaggtatcttttttcctgtcacttcttccaggaatcgcttcagttcccgtaactgtcccgcaacataccggacagaatcctgatttttctcatatggcacatcaatataaaatccaggcagttcatacgtctgcttcagataaggaaaggtcatcatattgccgtcacaggcaagattggtatacaccgtacatttcggttttggtaaaattcctgttaaagcagctcctaaaaatacccgatgataggaacacatcgtttccgggaatccctcttcttctgtctttctgagaaatgcctgctcacactttgtaccggcaagaaagcaggataacgcctccactgaataaggggtcagccccgctgcggtcagcagttctcccggaacaaaaatgctgaccatagctgcattttccggtcgggcaagtgcatgaataatatttttcataacgattcgtgccacataatgtgcagaatcgggaagatttttatctgggaaaaacttcagccgtttctcctgaagcctgtatcccataagaagaagacggcgggctttttcaggatcttttaaagattcactgctcaccatccttccaaactgattgatcagattcattgtcattttctccttctgcttttgaaaatttcaaagatgattatagcacattttttacccccatcatataacggagaaaatacactttgcgatttacacccgctgccctcataaaaaacaggaccaggaacgctctgttctgtccctgatcccaccgtaatctcatatatgatctgataacctgatctgatctttattttctaatgatgcaccataaaatactcgaggctgatctcattcgttgccacatccgcaagatttacgcaactgttgcccatacggtcgatcagatgaagaatattggtaaatggtgctgtcatactcgatttacattttcctttatttacacgctggatatgagcctttcgcattttaatatcaagatcaatgatcttatccttccgcttgatcagcttttcaacctgcacagagtcacggttctgcaatgctttcatcgaatcatcaaacatcttttcaagggttttgagactcttttgcagctcatccattgcctcttctgtatatttatattgatgatctgccttttcctgtatacatccggcaatttcaacacttaaggttcctatacgctctacatcacttaaaacatacatcagactggcagtctgagacgcctgctgctccgtcatggttcctgaagaaaagagcagggcaagatattctgtgatccggtctgccagtgtcttgatctgatgccctttttctgtaagtgcattcatccggctggtctcttccgtctttacaatggaaatcgtatctttcactgcttctttcaccatatcgcttaaatgaagaatctcttttgcaaccagttgcagtgcagctatcggctggctgatgatcttttcatccaggtataatgggcgggcaggatcgatctctttgctttttccgtcaggaatcagcatcataacgatcttgaccattacattgatcaggcagacccagatcagcgtcatggtaatgttaaatacagtatgtgcatttgcgatctgtctggagatcacttcaatctcaggtccttttggagaaatatactggatcagtgctgcaaatggctttacaaaccagataaaaagaaagcagcctgaaatattaaaaatacaatgagctactgctgttctttttgcatctttgctctgtccgatacttgcaagaagtgccgtgatcgtagttccgatgttatcaccgagcaggatcgggattgcaccggcaaggccaagaatacttgtcattccgtccgcccccggctgtgcagcaaaattctgaaggactgcaatggttgcactgctgctctgtaccaccagagtcatcagtgtaccaaccccgacgcctaaaatcggaatatgtgctacttttccgatcaggtctgtaaagacctgactggaagccagtggtttcataacatctcccatggtttcaattccgaggaaaagaagtccgaacgcaaagatggtctgtccgatactttttattttttctgattttgttacaaaagcaataataaatccaataaaaatgataatgtaaatatagtcactgatcttaaaagcaatgatctgtgcggtcatcgtagttccgatatttgcaccaaaaataatcgaaattgcctgcggcagactcatcagtccggcactcacaaatccgattgccatcaccgttgttgcactgctgctctgcagtactgcagtggtaacagctccggcaagtactccgagcaatggattctttgtcagaagtgcaagaatgcttttcattttttcgccggcagctttctgcaggcattcactcatcatattcattccataaataaagattgccagaccccccaggagtccgaatgctatctgtagtttttcattcataacgatccctctcatatcttttgatagtttgcaatgttattgtgtctgttctccaacgctacgacagcattgtagaaaactcatatgcattctgtatcaagttcatgttaaatctatgttaaatatgtcgggggcaaaagtccccgactttgatgctcatatcggggcgggtcaaatcgtgtatgaatgttaaatttatgctgagttatcgaaaaaccttacggtttatctttattttcgtttcttaaaaactgataaaaagccatttttcttttttatctgcactttttcttcactttccatgatctgtgccgtcatgccgatatttctcagttccagctttaagctttctgcctgttcttccgacaggccgtcctgaaccagaaagggaacatccttcagattccaacgggctgtaaagccatattttttcccaatattggcataatctgttcgttgtccgatataatcaaccacagactctgagacaataactttataaccggattccttctttgtcataattctgctccattcttacattttatccaaactaattttccgctctccgtaagttccttttttcttcatccacagataggctccgatacagatcagtacagacagcagtgagcctgcaggtgctgcaagtcccatcggaaacaatgtatccgggaacatttttgacgccagataagagccgggtacacgtacaagcacaatggcaatgatattatggataaatccaatataggatttttcatatgctgcaaaataaccactgaagctgaaatgtacaccggcaaagatactgtcaataatatatccgctcagatactgcgttccaagtaaaacgacaaccgtatcggtagtaaataatccaaccagattcttcccggtcaattcgatcagtactgtcatgatcagaccataacctgtagtaatgatcgtcgcatatttcagggtctgtgatgcccggtcatgctttcctgccccgatattctgtgcagaaagtgcggagacagtcgccagcatggacgaaggaatgataaagatcgcactgatcattttttcaacgattccaactgctgctgcatcattcagacctctgtggtttgcaatgactgtaatgatgataaaagcaatctggatacagccgtcctggactgcaaccgggaatcctacccgcaagatctgccacattacttttttattcggacggaaatcggtttttttcagatgaatcccggtctttcttttcatcattgagatcagggcaatgatcacactgaatgtctgggacagcgttgtccccagtgcagctcccgccggtccgagctgcattgcaccgataaagaaataatcaagtacaatatttcccatacaggcaatcccgataaaatacatcgggcttttggaatctcccattccccggaaaatagaactgataatattgtacgctgtaataaatggaataccgataaagcagatcgtcagataccggatacttcccgctatagcctgttccggtgttccgattaaaagaacgatcggacggacaaagcataaaagtcctgctgtaaagaccactgcaacgatcataaataaagtgatcgtattcccgatcgcatgggcagcatcttccagtcttcttccacccactgcacgaccgatcgccaccgttgtccccatggcaagaccgacaataatcacagtcagcatatgcagaacctgactgccatttgcgactgctgtgatactgtctactccataaaactgtccgacaataaaaagatcggccattccatataacgtttgtaaaaaataagataaaagatatggcagtgcaaaataaatgatcgttctcaggacactgctcgatgttaaatttttctccaaagttaagttcccccttctgaggattttctgtcagatcctctttcatttcctgatctgattctatttctttacttttaataatcctgcatttgccaggattttgagatccatcatacgaagcgtatcatcctggaacatgatatgaacaagccggtcatccaactgggtcactacaccttctccatattttttatgttccacgatcacacctgtccccaactcctctttcaggcggaaatacagttcttctgaagcttttgtctgccggatgccggcgactgcggcatagggtcttgcctgcttgaatgtccggctgatcctgctttccaccggcatcagatttttcctgccttcttctgtcacggaagatttcccaagaaactctgaacagaatgtactgggtctgttggtcgtaaaaagtgtcagatggtcctttgcccttgttactccgacataaaaaagccgacgttcttcttcatatgctttcagctcttctgctgatgcctgatgcagattctgtggaattgattcaggcagaattccatctgccacatcgatcagataaacgctgtcgtattctaatcccttgcttgcatggatcgtggagaggatcagaggacatttccgatccggttctttctcccggatcagaactttcaactgctccagtcgttctgcaagttccatcggggaatctgccctgcttccaagaatcctgagaatttccagcttgctgtcactcagccctgaacggttcagatattcctgatatcccatatactgcataatcctgtaaagtgcacgttctcctgaatcctgcaatagattctgcaaatgtgtccgcatcgaccgtacactaccgagtacatgaccgttcagatcaggatcctctgcagccacatccaggaccgggattcttttttcttcactgatccgggcgatacggattgcatcctgcttgcggagataagtgccgattttataataaatctgcagaaatgcttctgtatccattggattctgagccagttttatgatattgatgatatccagtatggtacggtgtgaaaaaaaagaaagttctgcattccgcatctgataaggtattccgtttctctccagcagatcgaccagtggaaggatgcattcattatcacgatataaaatagctgtctgtgaggtgcatccttctgccagctttgcaagatatgtatactgagctttcctgctccttaatgaaatctctctgatatcggatgccggttttctggcggctttcatatgcttctcatgacgcagagtattcttttggataaaccggtctgccgccagaacgatcctggcatccgaccggaaattttcttccatcaacaggacttttgcatccggataatttttttcaaatgtgagcagagcctccggataagccgcccggaagccataaatactctgatcttcatcacccaccataaaaagattctccgatcctgatgccagcagtgcaatgatggcatgctggattttagaggtatcctgtgcctcgtccacgcagatataagggtaaagttcctgaaaatgcctcagcagttccggtacggaacgcagcattgtataggcatataccatctgatcatcgtaatccatcagtccttttgcacgtaactgccggcaatattctttatagataacggaaatcttcagatcagcttcttcatctagttcaaggatttcttcctcagtcagcatcatattcttgatataagtaatcagagtacgcaccgtcttcaggtcactttccgttgcatatgcatgttcactctgttgatagatcatggacagcatccctgccgttattttctcatcctgtaccagttcaaaaggcttcttcccgatcattcttccataataactgatgatctttgcacataacccgttgatcgttctgaactccagtcggtcagccagttcctctccaaagtatccggcaaaccgccgggacatatctttcgttgctgccaccgtataggtaacagtcaggattttttccggatcaattcctttgcaatagatcatataaccaagccgggttacaagaacagttgtcttcccggaacccggtactgccaacagcagaaccggaccattgacactctgcacagcacttttttgctgtgcatttaaccggatcgggaaagtctgttcaaattcttcccattctatgtatcgtttcattttgtagtatcttttcttctccgtcaaattaatttcgctccgaaccgtgcaacaacttcttcgctatcttttgtctgcatggttcccttcctttctttttgggtgaaaattatcagcccgtctttcagatactttattgtataacgaatccgggctgtacttaatctacatatttggttcgtactgcactttttaacagccagcagcatcttcttacaatacatgaaaatgaggaattttttctccgtataaaaaatgcatcagataacttccgagaaagattcccactacgcataatcctgaaaataagactgcaaaaggaatacagatctgtcccattaactgaaatggctgatcactgtaatcccatacgtgccagtgcatcactttgttgactaaaatcccggtaataaattcccccgtagtcacaaaaacgctgcaccataaaacctgaagccagaggggcgaatcccatcccgtccaaatgccctgttgtatacagaaaaccaggcagaacccgcccagcataaacatagaccagtgagaaaatccccggaatatcatttcaaaagaataatataatgtaccacctaatgtccagaaaaataaatattcgctcaaacgtttcattaccatgcctacactcccgattcttgatgtagtttagtcttccccgctttgagcgaatctatttcataattctgtccggtctgaccaaagcatcatccggttcagttttctgaatatttaattgccggatttattttccaagtataatacggagcagagtcttgtccagcatcagagtcctgttccacggattgagaatgattccctggatctcatttacacttaatgcagattcaaataactttcggatctcagtaagaaatgttgacatgacgctgccacttcctttcagttcttcctcaaatcctgtaaaagcagaccaccactgctttccatctgaagtctgcactgcctgaatccggagctgtgcttcacctgcaggaggctctacagccagaatcaactgcccgtcttcctgcatccttctgcggatcactgtcagagtatgtgcaagaagttcctgtgacggttcttcctgcagtgcagcgatcgcctcttcaatcttttcattcccggacagtcctttgtctgcgggtatctcatttgcattgaaagaatctttcttcatataggttatccttttctattctgtatctttcattttccccatataatagaatcctttacattcatccagacttacgtctacaagtctgccgatcaaagaaggatctccagggaaatggactaaaagattattgctcagccttccggtcacaagactcggatcatgctcattctgacattctaccagtgctttctggattgttccctcatggatagcacaacgttgtgcagaaatcgtctgaacttcctttaaaagacggtcaaaccggtctttcacctctgcttctgatacctgatcttccatgactgctgccggagttcccgtccgtttggaataaataaatgtaaacgcactgtcataacggacttttctgaccacatccagtgtctcccggaagtcctcctcagtctctccagggaatccaacaataatatctgtcgtaagagagatatccggtaccgcttttttaatcttgtctacaagctcaagataatgctcttttgtatagtggcggttcatcttctttaaaatccggctgcttcctgactgaaccggaagatgcagatgcctgcagatttttttggatctgctcatcacttcgatcagttcatccgacagatcttttggatgggacgtcataaaccggattctctccagtccctcgattttttcaatctcctgaagaagctgtgcaaatgtcatcggatgctccagattctttccataggaattgacattctgtcccagaagcataacctccacaactccgtctgctacgagacgctcaatctcacgtacgatcgctttcgggtctctgctgcgttcccttccacgcacatatggtacaatacagtaactgcagaaattattgcagccgaacatgatattaacaccggatttgaaagaatactttctctcaaccggaaggtcttcaacgatcttatctgtatctttccagatatcaattaccatccggtcagactgcatgctgttcgtaagaagctctgcgaatttgtatatattatgtgtaccgaagatcaggtctacaaaccggtaactctttttcagtttctctacaacctccggttcctgcatcatacagccacataaagcgatcatcatatgcggattttttttcttgatccttccaagctgtcccaagcgtccgtaaactcttaagtttgcattttcccggacagtacaggtattataaataacaaaatctgctttctcctcgtccggttcttccacataaccgatctgctctaaaataccgaccagtttttcggagtcgcgtgcattcatctggcagccgaaagtcgtaacacagaacgtcagtgtcttgtcggcttctttacatttttctgcaaaaatatcttttgctttttcaataaaataatactgacgatccggttcctgcagcggtgcctcacttgcagtctctgcaaaggaagtcagtctatggtgcttcgtattttccattttcattccttttctatgtatatttttttaaacgaactgattcttcaagccatcgtattcataatcaatctgtgccagtttctctttcagttcggcctcactgatctccatatcatcacataaagcctgcagcgatggataaaaatctctcagtttcgtgttcacaacacttaacaagatcatcggatcggaaggaagtccgttcaacatcttttaattcccctttttttcaaatttagcaccgtatttttcacccaggttgatcacggtaccgtctttctgttcgatatcaatattgttcagttgtccacgcagatttcggcggacaagttccatgtattcctgacgcagaatcttctgttctttccgttctgcgtcagtcagtccctcagcttttgactttttatataattcattaattctttttatcttttgctgatccatcttcatttcctttcaaacttgtaaatctgtctcagttttttctaaatatccgcagtgtattatacacgattccgctttattcgtccaccctcccgggttcaacttgaataattttcaagaaatccatataattcttccggtgtttctatataacggcctttgtcaagatctgcccggaggtcatccggtaatgcctctactggaatattggttgtctcatagaggcttgtcccatccgcacgatagaccgcaacgtaaccgtttaattcttttaaataatacccggaggtcttctttgtcgcatctccttcggtcattacactctgctgtaaaaagtcttcttcccttttttccgcttcttccactcttgcctcctgccgctgcataacataccggtaactggctgcatatcctgccgataccagcaataccatacagaaaagagcaaggaaaaagccgaccacgtattttttcttcataaggaccactccttttttatacagtatcggctttttttaaaattttattctgctataagaaaaatttatattaaatgtgcttttcagactcctgcattcctgtatctgtctctttctgaaaagccttgctctatgacggcatcagatggaatttcttcgctgccctgagaatctttcctcccattggcagatccagaatatcatcttctgacaacgttccgatcttcaataagacgactgcatatacgagtactgccacgatcagagagaccaggacaggaatcactcttcctcccacaagcagatcaaataatcggaacacaccatatgtaatgacccccataattgctgcagccgtaaatggcttgccaaacgtgctgagcagatccatcctgaacccgctgactttccggatcttgatcagattcagaatactcattgccagtgcaaagacgatatttcctcctacaagtgcatagacattcattttaaataccgtcatcatcaggacaaaggctgcaaggtgaatcaccagtgcaactcccgcattcttggcaggacttgtcatataattcaatccatgcaggatcgaattggtcacagaagaaagaccatacagtactaccacaatcgatcccatcatcagcagatgagcaggtgttgtacttctgtcattatagagaagaaccatgatcggtgaagcaagcacgaaatatccgatacaactggggattgcaacaaccatcgtaatccttaaggtctggttgatcttactgtgaacctgctttctcgtaccatttgtcacaactgctgtcagacttggcacaacagaagtacccagtgcattggcgattgccatcggtacgttgatcagtgtatcatatttaccggtgtagattccctgcaaggccatatattctttttccacatatccctgtgcttccatcacatgattaaaaatcgtcaggtcaatgatctgattgatattgtagaccgctgtgctgaatacgaccggaatcgctgtgaaaagcagtgctttcagaatgaacgaataactttccacgttctgactgcggtcacgtttcaactgacgtcggatcacttttttataaagaattataacgaaaagcagaaataaaagtcccgccagtgaaccagcgaccgttccaagcgtacttcctgctgctccataagcaggtccgagcagttcttctcccttttcagcacctgcctttgtaccgatcccaaataatacgctcgcacctacaatactgacaaccgcattcacaatctgctcaatgatctgtgaaatagccgtcggaatcatcgtccccattccctgaaaatatccacggatgaccgccattaccgcaacgatcagcaagcccggtgcaagtacacggagtgcatagacacttaacggggatttcatcgcatgggtagagatcagtcccgcccccaggaaaatcgtcagcgaaataaataaaccgactcccactgcaaatgcaagggaacacagaaatacccgaaatgcattccgtttctgtcttttggcaagtctgacagaaaccagttttgaaacggctgtcggaagactgaacgaagagatcatcaatgcgatagcataaacctgatatgcatatccgtaaaatccatttccttcgtcacctaatatattggtcagcggaatcctgtaaacgacaccgatgatctttgtcaatactgctgctgcggccaatatcgaaccctgaacgatataatcatcctttttggctctgccttttgtcttagttggtgtatcagacatacttcttcctctcatattctaaagttcttgcttttcttccagggcagtcccatccgggaattctgcacctgtctgctcagcgtggaatccctactttttccatgatcgctctctgatgagcctccatttctgcccgttcctcttcttccatgtggtcatatccaaataaatggagcatgctgtgggcaatcaaaaatgcatattctcttttcggagaatgtccatactcttctgcctgagagaggactttttccttggaaatgacaatatctcccagcatcagttctccggtctcggggttaaatgcatctccggtttcctcatcaattactgaaaaatcacctggagcatcatactcgatcattggaaaggataatacatccgtcgggcggtcaatgccgcgttgttccaggttcatctcatggatctcctgattctctgtcaggagcaggttgatttctgcctcataaggacattctgcatagtccagtgctgcttctgtcactgcaatggcaatctcctctgtatcaaacggcagtgtgactgaaccctcttcttcaatatacagactcattactttttcctccggttctctcttggtcgtgcggatttcttctcatagtcttcatacgcttttacaatcttctgtaccagcgggtgtctgacaacatccttgctggtcagcgtgcagatgctgatatcatccagatccttcaccactttcactgccacatccagtcctgatacagttcctgccggaagatctttctgtgtggaatcaccggtgatgacaacttttgatccaaacccgatacgggtcaggaacatcttcatctgagccggtgtcgtattctgagcttcgtccagaataataaaggcattatccagagttcttcctctcatataggcaagcggagcgacctcgatcagacccttttcagaattttttataaaactgtccgctcccatgatctgatataaagcatcgtataatggccgcagatacggatcaatcttgctctgcagatctcccggaaggaatccgagcttctctcctgcctcaattgcaggacgcgtcagaatgatcctgctgacttcctctcttttaaaggctgtgattgccatcgccattgcaagataggtctttcctgttccggcaggaccaagtccgaacgtgatcatgccactgcgaatggcatccacatactttttctgccccagtgtctttggcttgatcggctttccctgcagagtatggcagatcagatctttatcaatatctacaagctgctgctcctgatcttcaaatacaagggagattgcataatctacattctgttctgtgatcgtattgcctcttctggcaagttctacaagctggttcaggatcctctgcaccttctctgccgctgcacgctcccccacgatcttggtcgctccatcgcgggagatcagcgttacatgaaatgtcctttccagtttctttacatatacatcaaactgaccaaatacatttgcctcgtattcagccgggatttcaatcatcagttctgacagactcatccggttctttcctttcaatcgttactatttctgtatcagcctcacaggcgatcttccggttcagataaagtgtcccggatgcacaggcttctttttcgtccagttgtattttaacattattctgacggatttgaatacctttttcagttaaatccttacaaaaattctgaaaccgcctgcttaaaaattcctgaagttctttcctgctgtatttttcttcttttacagaataagcagtaatttttctccacccggtcacaacaggcagataaaaattttcacccagtttccactgatgctccagtgaacttttctcactgtgccgaaactgattcttcaaaatacctgcctggatctcccagttcccgatcttcatgtagaactgataccgcgatttcccgttgtagctctttttctcgtagcttagagggatggaatcctgataaggcagcttcgtatctgcataaatatctgcatccgaatgacagtactgataaccggtcacttctccaccgtcgtccgtcacatcgatccttcccagcaccagcagatctcccttttttacagaatctccgatatgcacctgcggaacacccgaacgggtaatgatccctgtgatcacgccatcttcttctgcgatcagatccgttggtttctctgaaacttcttcggttccctgcatctcttcctgaaaggtatcttcattttcctttatctgaattttcagccggcttccatcgatggatgctgacacccaaacgatatcattatattcctttcggattgcttttacaatacccggacaatcgactttcttttttctcattccgggagaaacttctttggtctttaaaaattctgtcagtgcttcatccgtccatttgtcatttccttcaaaatgaatatcccagataaaaagtgaatatccccagatcaacaggatactcagcagaatgccagcaaataatgcacctctgtggcggtaactctggacaaaaaacggaaatccgttccgctgtgtcacataaatcctcatatgagtcttacgtgcaaatggacgaagctttctgaagcccgcaagacttatatacatttcgtaagcattcccgacgcttttcagttcccatatcctgatcccgtgaaagcagcacatattcaggaaacgttccggagaatatccggtaatccggatttttacatatcctttcagatagcggaacaaagactggatcatccggtctttctcccgtcggtaaattccagttgtacgatccttcctgtaatcttcatttcatcgtttgtataatattcaatctgcagattttttccgctcagccggatctgaccggatttggtctgcacacggatcagaaggtctgtatattcaagaatcccccgataattttctatgcatatttcatttcttcctgtgatcgtgataacagatgctcccatcaccacatcccttggcatacttgcagcctctgcgaatcgctctgctaattgttctctgtccataaaaatgccacacatacacctttaccttcagtatatgcgtggcataaatgtcctattctgcctctgttccatccaggatttcccagatcagcggacgtaccgcaaccggttcttttttgatctcatacgctttcaaaagtctttcctttgcctctgccagcttttctctgtcatttgcatgaaggatcgcaagtgattcaccggagtgtaccgggtctcctacttttttccgaagtacaagtccgaccgacagatcgattggatctccctttttggctctgcctccgtcaagcagcatacaaatccttccaatctcttcggtatggatcttcgtaacaaatccactcttttccgcacagaccgcctcctgacagagagcctgcggcaaaagatcaggatgttccacttcctccgcagttccaccctgtgccacgatccattctttcatcacctgaagtgcttttcctgaatccagggtctcctccagaaggatacgggcttcccggatatcttttgcttttcctgcttttaccaccatcagggatgtcaggacaagtaccagttctctcaggtcttctggtccatttccatttaacgtggcaatcgcctcttttacttccagtgcatttcccactgcatatccgagaggctgatccatatcagaaatgactgccgacatatcccgccctgccagcgtaccgatctgcaccatttcacgtgccagagctttggaatcttccagtgtcttcataaaagcaccgtctccggtttttacgtccagcacgatcccgtccgcaccggatgctaactttttactcatgatgctggatgcgatcagtgacatctgatccacggttccggttacatcccgcagagcatagattttcttatcagccggagcgagattggctgtctggcctgccagagcaatatggatcgaatttacatttttaataaactgttccggtgtcagactggtatgaaagccatggaaactttccagtttgtcgatcgtacctcccgtatgtcccagtcctctgccggacatctttgcgacaggaactcccgctgctgccgcaagcggaccgatgaccagtgttgtcttatctcccactccaccggtactgtgcttgtcgatcttcttcccatgaattgcagacagatccatcagatcaccgctctttgccatggaaagagtcagattctttgtctcttcttcatccattccggtaaagcagatcgccatcaacatggcagacatctgataatccgggatctcaccggctgtatacccctgtacgatccagtcgatttccttttcattcagcctgccgcccctctttttcttaacgatcagttcacacatattcatatcaatgcacctcctttagacatggaaatggaacggttccttttcgttccggtacgaactttgctcctctccacttatttcgcctttcgctcttttccggtaaattcatacacattgatctgccatacagccgtcctcgtcaacatttccggccggaactcaatctttgctcccggagccatatgctccatgatccgctgaagtcctttctctttttcttcaaatgtttccaaaagggtaacggttccatttcccatgatactccggtaagaataggaataagcacaggtataatctccggtaatgatcccgtgtctgcaatccatttcaacggcaacaggactctgggattttaaagcatctgcctttcttccttccgctgccccgtgaaaatacaattgaagttctgcttttccattttcttccgtgaactcatacccataattcaccggaacaatgaacatcccttccgcatcggtcagaccgagtcttaccgtgtcacactcttctacgatctcttttaaaacttcaggatctgtaatctctctttttgccagtctcatttctctcatgtatgtctcctccctttcagcagcttcaccagtttctgtcctgcatccaaaagtatcgtcgcgatcagtacaccaagactgtcaattcccacatctctcaccgatggtccgcgtcccccgacgaaagactgatggaactcatctgttgccgcataaagtacacagaaaataaatcccaccatcagccagcgttttctgcggaatccattgacataaaatccaaaagcaaccagcagggtaaggactgcatattccgtcatatgagctgccttcctgatataaaactcaatctcatctgcctgcttttctatttcctttttttcaagttcctgatgaaagaaccttcctttcgtctcgaccacccggacactgatatcatggctgagtgaacctgactgagttcctgtctgtgcagaaaacgaaaaaataactcccatcatgaacagtgccggcagaaaggcacataatttccatatttttttcattgatctcctgccttattatttatgatatggttctccatttatgatccggtaactgcgatagatctgttccagcaggatcacccgcatcagttgatgagggaaggtcatctttgaaaaacttaaggcatagtctgattttccaaggacttcttttccaagtccgattgacccgccaatgataaaaaccagatggctcgtcccctgtatcccaagctgttccacttttgcagccagttgttccgatgtgagctgctctccgttgatttcaagggtaataacgtatgcatcttccttaacgtattttaagatccgttccgcttctttgctgcggatggaatcctccacagcctcactggcatgctccacagtcttttcatcggcaacttcgatgatctccagtttacaataccggctcagtcttttactgtactccgcgattgcatctcgaagatatttttcttttatttttccaacagtgatgatcgtaatcttcatggcgtactccggttactttttcctgcggatatggatttccgggattgcaacattttcataggtgatcggttcatccggctgcggatcagtctcggtatgttctacttcccctgtatgaacctccgggactgcaaggttttcacttgcaacatcatatttgactttttccttttttctttttttccaaaacatttcaaaatctccccattacattttataaaaaattgataaagaatgtgattgccagactgttcagaaagtctgcaaataaacttcctaccagcgggatcagaagatacgcctttacggaaggtacatatttctcacagattgcctgcatatttgccatggcattcggagttgctcccattccgaagccacagactcctgctgataaaactgcagcatcgtagtctcttcccataacagtgaatatcacaaaataagcatacaggaacatcagcacaacctgtcctccaagcagggtcatcaacggtaatgcaagctctgcaagctgccagagctttaacgtgatcattgcaattccaaggaataaggaaagactgatacctccgatgtcattgatctcacccatgtagatcgtaaatttaccggaatactctcctacattccggatcactgctgcagcgatcatcgctccgatatagattggaaaggtcagtcctgtcatagaaaggaaataggacacaatcgttccgatcccgatcgcaatgatcagttggaatacagcagacggatacatactggtatgtctttcgtgcttcttctcttcttccaccagaaggctgtcgtcctctacgatggctgtagataaaagatttttcttttcaatcagacgctttccgatgggaccaccgatcatgcttcctgcgatcagtccaaaggttgctcccgcagtacagagcgtacttgctccttttaccccaaagtcttccaggaccggtccaaaagcaccggctgtaccatgacctccgaccattgggatcgatccggtacaaagtcctacgagcggactgatatgcagaagctttgaaagtccgattgccatgaaattctgcgtcacgatcagcacgactaccagtccaaggaatacgatcaatgactttccgccacttttcaacactttcagattcgcctggaatcctacagatgtaaagaaaaagaccatgcagacttctttcagaatatcgtcaaattcaaattctgcaatcccggtggcataacagatgcacgtaaaaattgcaaaaagtactccgccgatcaccggtgccggtatgcagaatctttccaggacactgcaacgcttctttaaaaattttcctaacatcagcacgactaccgcaacggcaatcgtctgatacatatctaactgaatcttcattctatttctcccgttcttatgctattcttcgttcatgctgatcccatgttcttcatagtaaacggctgccccgtcatgaaatgggatcgtgattccctctgttgcctggctctcatcaagtgaaatatctgttggaagaatgtactgaagttcagccttattttcaaataaaatttctgtgatctcttttactttcttttctgataatttgtcgcttgcgagtaatactgcctttactcctactgttctgacagcttcagtctgcccgacatatgtattttcaggaatttcacattctgtatagaagtcataagacttcatcagcttgtcgattcccttctcgtccagatctatgaatcggatctcacactgcttggcaagttctccgatcaccgttgtataagcaccggctgtacagaacatggcatcaatctctttctttttcaactgttcgaccgcgtctgtataatccagattcacctcggttactaaccgttctgacagaccgtacgctgccaggatctgctctgcatttttctctgttcctgactcttcttctccaacactgactgtctttccctgcagatcttctactgaccggatgtccgaatcagcacgtactacaatctggcacgcctccgtatataaccctccgacagcggaatatccctgatacttcttatcattttcaaacattcccactccgtaatatgcatcattgatgatatctgcctgtgcgatggccatctgaacatacccgtctgacaaaagccgtacattcgcggcagaccctgctgttgtctttacttctatcgagcagtcagcactctctgattctataatttctgcaaaagcatcactgaacatatggtaagttccacccagtccggctgctccgaaccggatcgtgccggaactgctgccacaaccggtcagcatcagtactgccattccgaaagcaagtaatttctttttcatatgcatctcctccttgtttctctctttttccttttatacatctgcgatctcatacatatacagttcatgcaaagctctcgtcgcacagatatactctgcctgctgtctcaaaggattctgctccttgcctctcaccgcaaagacctgatcaaattcgagaccttttgcaagataaaaggtcgttactgtcagtccctttttaaaggaggaactgttcttgtcaatataggcgacttccgctccccgcaatttcagaagacggttcagctccagggcttcttcctccgtcatagtaagaagtgccgccgtttcaaactcctcattcagattttcctgaactgcatccagcaggaagtcctccgatgcaaacgtctgctctgcaacttcttttccatgcctgtccagaaggatcagatcctctatgccactgatctttgctgcatactcggcaatctcaaccgtattccggtaacttttattcatctcaatcttatgaagatcccgtccaagaatccgtggaagaaatttcaggacatcctgctgccggacatccattgtctgagcccggtctccaagaatcgtcatcttacaggaaaataaattggcaaggatcgtatattgcaaatatgagtaatcctgcatctcatcaatcaccagatgcttaatatttttatgcgaatgatttccaccttccagtctgtacttcagatacaacatcggaaatacatcctcatacgggattttccgtctctcatactctgctccggacagcggatcaagtccacactcttccagcaactggcaataaatcctgtaaagatccttcgtcacatacattttatcgaatttttgctgtaaaagcaatttatcatcatcagaaatattccgtcctcttaatgtctcccattcatcgataaaataatctcttactaaatccatcctcttcagaagtggtgtctcggtaaatttataatagaacagcttcagtatctcttcttctgtcattaccgttccccgatactcaaccggacggaaatccatcagggaatcctccagcattgcaagaaatccttcgatttctccgacaaattctgctgactgcttccagtcagcccgccgcagtgcttcctgatccggaaatttcataattcgttccaactggtcgtatttatcttcacagtctgccgcagtatttttcagttctttataagcaaacaaatcaaaactcatctcccggatattttcttcacccagttcaggaagaatatgcgaaatataatctgcaaaaactccgttcggtgacagaatcagaatattggaagatttcagattttcccgctcatgatataaaagatatgcgatccgatggagtgcaatggaggttttgccactccctgccgcaccctggatcaccaaaatccggtctctggtattgcggatgattgcattctgctccttctggatcgtacggacgatattctttaattttacatcactgttcgtgccaagctcctttttcagaatatcatcgtcaatctttgtatcgctttcgaactcatagatcatttttccatttttgatcttatactgccatttggaaaggatctcaccctgtatttcaccggcaggagcctgataaaccgccggtcctttatcgaaatcataaaataagccactcacaggagctctccagtcataaaccagtggctgcatcccggctttctcagcgaaatttccaatgccgatataaaatggctctgcctcttcttccccgtcaaacacgaaatcaactcttccaaaaaagggagagtccagcattttttcaaaccggtgctttaactgcaatttttcctgatttgcattgacctgatggagcagtgcctgctgattatcataatcttcatagccatactcatccatctcggtataatttccccaataatactcctgcatattatcgatctctttctgtccgtcagagagagactttctgatctcatccagtcttttctttaatttcaattctacttcttcaagaaaataacttccgttgaatcttctgtcgttcttataatttgtcatgtattcccccagaaatttatttactgtatttttgatatgacatcaaagataaatgccctttctctctgatatcatatccactggctttttattctatcataaatccgacgaattgtatcgtaaaaaaagaaatcccatgatctttcttattccttcaaaggataagaagaaaatcatgggattttctttttcactggttctataaccttataccagtctcgttaaagattatttatttttcagatattcatcaatacctttcgcacctgctttaccggctcccattgcaaggataactgtagcagcaccggtaacggcatctcctccggcaaatacaccttcttttgaagtctggccgttctcttcctctgcaacgatacattttctgcggtttgtctcaagaccttttgttgtagaagagatcagtgggttcggagaagttccaagagacatgatcactgtatcaacttcgatatcatactctgatccttcgatctcaaccggacgtcttcttcctgaagcatctggctcaccaagctccatcttaacaacggtcatgcttgtgatatttcccttttcatcaacattgatcttcttcgggtttgtcagaaggtcaaaaatgatgccctcttcttttgcatgatgtacttcttctgctctggccggaagttctgcctcgcttcttctgtatacaatatgtacttctgcaccaagtctgagtgctgttcttgctgcatccattgcaacattaccgccaccgacaacggcaactttcttgcctgctgcgatcggtgtatcataatcttcacggaatgctttcatcaggttgcttcttgtcagatactcatttgcagagaagacttcatttgcattctctcccggaatacccataaacatcggaagaccggctcctgaaccgataaatactgcctcaaatccctcttcttccatcaactggtcgatcgtagtggatttaccgatcacaacattcgtctcaaatttgacaccaagctcttttaccttctcgatctcttttgcaacaactttctgctttggaagacggaactcagggataccatatacaagtactcctccgagttcatgcagagcttcaaatacagttacatcataacctagctttgccagatctcctgcacaggtaagtccggacggaccggaaccgatgactgcaactttatgaccattctttgtctctgcacactccggcttaatatcatgctccagagcgtaatccgcaacaaatctctcaagctttccgatagaaactgcttcacctttaataccacggacacattttccctcacactgggactcctgtgggcagacacgtccacagatagccggaagggcactggacttaccgatcaccttataagcctcttcgatatttcctgcttttacctcctgaataaatgcagggatattgatggatacaggacatccctggatacatcttgcattcttacagttcagacatctcgttgcctcttccattgcctcttctttattgtatccaagacatacttcttcaaagttggtagcacgtacctttggttcctgttctcttacaggtacttttttcatcatatcagccattactcgtcacctccacaatgtccgcatccgccatgatgggtatcgccttcctgaagtttcagcattgcacgaccctcttcagacttatacatctggcttctcttcattgcctgatcaaaatcaacaagatgtccgtcaaattcaggaccatctacgcaggcaaatttaatctcatcgccaacctgaagacgacaggcaccgcacatacctgttccgtctaccatgatcgggttcatgctgacgatcgtcgggatctcaagcttcttcgtaagcagacatacgaacttcatcatgatcatcggtccgattgcaacacagacatcatactttttgccctcaccgaccagctcttcgatcatggtcgtaaccatacctgcgtgaccataggatccatcatccgtacacggataataatttcctgcaactgctttcatctcatcttcaaggatcagcatatctttcgtcttggaaccaacgataacatctgcttcaatgccatgctctctgagccattttacctgtggatataccggagcagctcctacaccacctgctacaaaaagcatttttttcttcttcagtgtctccagatcttcttctacaaattctgatggacatcccagcggacctgtaaagtcacggaaatagtctccttctttcagttctcccatcttcgttgtggaagctcctacttcctggacaacgatcgtgatcgttcctgcttctctgtcataatcacagattgtcagaggaatacgttctcccttttcgtccatcttcacgataataaactgacccggctgacagtgacttgcaacacgcggtgcatgaacatccatcagaaagatcttgtcggccagtcttctagcttttacaatcttatacatgattctcctccttgtaaataattaccctttttttataatacgctaacccctgtcgaaattcaagcataacataaaggcagacacccggaaaaagtgtctgcccctcttttcttcggaatcaggtccggatctctgtccggtttagaaatcaacctctgttccgtaatatgtacatgtaagaagttttgccatagcggcaggatcaatggcacgcggatttgatcccgtacatgcatcgccaactgccagttctgcgatcttgtctaccttctccttgaattcatcctcattaataccgaagtctttcaacgtcttaggaatgttaagtcttacattgaaatcatcaatcttctcaataagactgttgatcagtgccttctcagatgttcccggaagacccattctgcgggcgatctcagcataacgctttgcagctacaggatcttttgcgttatattggataacatacggcagataaattgcatttgcacaaccatgcggaatatgacctgttgagaaagctgcacctgtcttatgagccatggagtggacgattccaagcaatgcattggagaatgccattcctgcaaggcactgtgcatagtgcatctgctctcttgcaaccatatcgcaatgataagatgccggcagataatcaagaaccatctcgattgcctgtaatgcaagcggatccgtgaaaggtccgttcagcgtggatacatatgcctcaatcgcatgagtcagggcatccatacctgtatatgcaacctgctttaccggaagtcctgatacaaggtcaggatcaacgatggctacatccggtgtgatattgaagtcagccagcggatattttactcctgtctgataattcgtgataacggagaatgctgtaacctctgtagctgttcctgatgtagaaggaattgctgcaaattttgctttctgtctcagttcagggaaactgaacggagtaatgatatcttcaaaggagacctctggatattcgtagaatacccacattgcttttgcagcatcaatcggtgatccaccgcccatggcaacgatccagtccggctcaaactcacgcatcacctctgcacccttcataacggtctcaacagacggatccggctcaacaccctcgatcaaccttacttccatgccgccctctttcaggtagtttactgcccggtcaaggaatccctgacgcttcatagatcctccaccgacaacaagacaggctttctttcctttcagattcttcagttcttcaagacagccttttccatgataaatgtcccttggtaaacaaaatctactcataacaaatctctcctttttatgtagtattgttatttttttaacatgtatattatatctctctgcacgcaaaaaagcaaccctgtttttggaaattttgtataaattccaggtaaaacagagttgccttatagtaactttacacagaacctctttctgcataaaatttattctgccgaaggctttggaatataggtcttgcttgtcatggctgtcgcttttccattctgattattgatcagtactacattaaaagttacctttgcatccagccgcaggtcaaccggtgctgtatatttcgtggcacctgcatccggtacagaaccatcggttgtataataagccgtatacccatccggaactgtcacagtcacctggatcgttccgctgtatgcacccgtagatggagaaaccgccggtgcatcagccaccgggaatgcaatcgtatatttcgcacttgccacaacgcttggcactcctgccttgttgacagcaatcgcccgaatctcagtcacgccttcttcctgcagaaggattgcctcagaatatttctgactggcagtcgtcggttctgacccgtctgtcgtataataaatatctcctcctgtctcggaagaaagagaaacctgctgaacctctgtataactgccctctttcagactgaattccggtgctgtggaaacatatttttttactgccttaagtactttactgtcatcgcagtcttccagcagtacagagattttatccagttcatcatttttcacataaaaatcaatgactgcctcataaagcttttcattggatggctgtgtctccaacgcagtcagatacacagattctgcactgtccagatctccctgatccacataaatatctgcaagccccttgtacgcttcaggcctggatttgtccttgatcacagcacggtcaaaatacttctgtgcaacttcgtaattatcctcctgcagtgctgacattccctttttcatgactccggtataagaattctgataaatcacataaattcccacaccgatcagacatacgattaaaaaaagaacgagcaaaagattccttctctttttctttgcggcttctctccgcttcatttgctgaatcctgcggtattccggtgaatcttttctgagatttccggtctgttgcctctccgcctgtctccggttctgctgttctttagaacgacggagattttctcttcttgcctccctgagccgttccatctcattttcattcagaacgcgggtagaacggacactctgggtctgactcatctgacgctgtctccggacatcatctgtccggatctgacgggtagccccttctaccgaaccctttacttctcttgcaagaacatcatccagcgggttataatccgggaccatctgtacttcagcattgcacctgggacagatcaactgaccatccggtatatttgctccgcaatgtacacacttcatgatccggtacctcctagctgcgtacagtctctacacagttattcatcagcatggcgatcgtcatcggtcctactccgcccggaacaggagtgatcgctgatgcaactggttcaacatctgcaaaatcaacatctccacacagatgattttctgcatcccgatgcattccgacatcaataacaaccgcaccttttttaacataatctgatgttatgaaacgctcttttccgattgcaacgatcagaatatctgctcttcttgtcacatctgcaagactcttcgttctggagtgtgcaaccgtaactgttccattttcccggagaagcagtgctgccattggtttcccgacaatattgcttcttccgatgatcacacattcctttccggcaatctctattcccgaacgcttcagcaactggatcacaccggccggagtgcaggataaaaatcccttttccccgatccacagtcttcccacactttcaggatggaatccatccacgtccttatcagccgaaatcgtccggatgatcttatcttcatcaatctgagcaggaagtgggagctgtacaaggattccatttaccgtatcatccgcattcagttcctttacaagctctacaagctgctcttctgtcgtatcctccggcagttcatatgcccttgattctactccgatatatgcacaggctctttttttatttcttacataaacggaagaagccggatcatcccctacctgaatgacggcaagacaaatgtccgttccgtcattcttcaatgcttctacctcagcttttaattcatctttaatctgctgtgaaattgcctttccatcaattaattgtgccattcttttctccttcttgttccggttaccctattattttatacaccctttatttgatgttggggtcaaaagcccccaacaatgatgccaacggattgtttcgtgctacgcactcccacaatcctgacatctttattttcctgtatgacagaagatccttagaacagacctgtgatctttccgtcgtctgttacatcaattccatttgctgccggtactttcggcagtccaggcatggtcattactgcacccgtcagagcgacaacgaatcctgcaccggcactgacatagacttctctgatatggatatcaaaattctccggtcttccaagcttcttcgcatcatctgacagggaatactgattcttcgccatacataccgggaaatctgagaatcccatctcttcgatctttgcgatctgctttgacgcagccggttcatacaccacatctcttgcaccatagatttcctgtgcgatcgtacggattttatctttcagagaaagttcttcactgtaaagtggatggaaacggctttcctttgtctccagcgtctccagtactttctcagccagtgcgatgccgccttctccgcctttttcccatacttctgaaagtgcaaattcacagttatggtcatgacagaatttttcaataaatgcattctctgcatccgtatctgatacaaaagaattcagcgtaacaacaaccggcacaccatatttctgaatattttcaatatgcttttcaagatttacaattccttttgcaagtgcatctaaattttcttctgcaagatctgcctttgcaacaccgccattgtattttaatgcacgtactgttgcgaccaggacaactgcatccggcttcaatcctgccatccggcacttgatatcaaaaaacttctcggctccaagatctgcaccgaaccctgcctccgtcactgcaatatcgccaagcttcagggccatctttgtggcacgcacactgttgcatccatgtgcgatattggcaaacggtccaccatggatcagtgccggtgtatgttccagtgtctgaatcagatttggcttgattgcatctttcaaaagtgcagtcatggcaccggttgcctgcagatcatctgctgtcaccggatctccattaaaattataagcgacaataattcttcccagacgcttcttaagatcagcaagatcatctgcaaggcagagaattgccataatctcggaggcgactgtaataacaaaatgatcttctcttaccattccgtcggtctttcttccaagaccaactacaatattccgcaggacacggtcattcatgtccacgcagcgtttccacacgatctgacgtggatcgatccccagggcattcccctgctggatatgattatcaagcattgctgccagcagattgttggcagaagtgatggcatgaaaatctcccgtgaaatgaagattcagatcctccatcggaaccacctgtgaataaccgccaccggctgctcctcctttgattccaaagcatggtccaagagatggttcgcgtaatgcgatcactgattttttgccaagctttgcaaatgcctgtccaagacctacagaaattgtcgtctttccctctcccgccggggtcggattaatggctgtaacaagaaccagctttccgtcctcgcggtccttgatccgttcccagagttcatcagaaagctttgctttatactttccataaaattccagttcatcctctgcgattcctgcaccctctgccacctctctgatgtgcttcatttctgcttcctgagcaatctgaatatctgtcttcattcctgtttcctccttgttcatccctcttattttcaataacatcctcacactttcatgcaagttctgtaaactacgattcctgcttattttccgctatgtatgcgtcaaattcttcttttgacataagaacttttctcggctttgtcccctcttcgggaccgacaactcctgcttctgcaagctgatccatgatccttgcagcacggttgaacccaatcttgaacattctctggagcattccgatcgaagccctgtctttgtcaatgatcagttgtcctgcttctgtaaaatagacatccctgtcatctgtatcctccgcagatactcctgaaatggatgtcggaacatcagcagtcatcatatgttcttccagttcattactgtaagccgtacttccatttttgtcaatcagataatctacaactttctgaacttctttatcagagacaaaggatccctgcaccctcaccggctttggataaccggatggatagaacagcatatctccttttcccagcagcttttctgccccgttcatatcaatgatcgtacgcgaatccactcccgatgaaactgaaaatgcaattcttgacggcatatttgccttgatcagtcccgtgatgacattcactgacggacgctgagtcgcaaggatcagatgaagccccgccgcacgtgccaactgtgcaagacgacagatcgccccctccacttctccgggggctaccatcatcagatctgcaagctcatcaatgatgataatgatctgtggaagttttttctttgcatcttctccggtctcacctctcaggactttttcattgaatcctttcaggtcccttacattgtactcagcgaaaagcttataacgcttttccatctcggcaactgcccagttcaaagccccagcagcctttttcggatcagttacaaccggaatcatcagatgcgggattccgttatatacactcagttctacaactttcggatctaccaggatcagcttcacatcttccggatctgctttgtagataatgctcatgatcagggtattgatgcagacagatttacctgaacctgtcgctcctgcgacaaggagatgcggcatctttgcaatatctgccacaacaacttttcctgcaatatcttttccaactgcaaaggagatcagtgatctgctgttcttgaactcatcggactccagcagatctctcagcataacggctgtattttcactgttcgggacttcaatcccgacagcagcttttcccggtataggagcttcgatcctcagatcagcgacagcaagattcagcttgatatcatctgccagcccgacaatcttgctgactttcactccctgttccggctgtagctcataccgggtcacagacggaccacagcttgcattggtgacatgaacccctactccaaagttctgaagtgtctgctccagctttaatgctgtggcacgcagatgtgcatcggaatctccaccgccctttttcccttttaccagaagattcatcggtggaatgcggtaaatcttctgcggctgctcttccattgccctgacagactgctctacactggctgtctcggctgcaactgcctgtgcattttctttcgtatttttcctgttccgtctggccggcatctcctgcggatcagatggcatctgcattgcatcaggtactccttcttcagcagatctttctgttccggtcttctctgtctcttctgctgtaagcggttctgcacggttaataacaaaccgccccggatccgattcttcgctatctcctccgtcagggactgctccttccggggtcagttcctggatctcaggagattttctccgccttctgctttttctctcccgcggtacttcctcttctccttccccatgcaaaagagtcgttgcaaaggaaactcctcttgcctttttctcttttccaccaggaactcctgctccgctctcttctgtctcctgagctgtctgccgctctctttctttcctttcccgctctttcgtacggatcactgcggtttcctgtctctttctttttgcctcttcatatgcgactttgcttttccgtccgatgggagacagaagagaacgctctgtgatcaggataatactgatgattcccagtacaaccaggatcacaccggcaccgatctttccaaaaagcggacaaaataaccggatcagacagcctcctgcgaaacctcctgcattcttatgctcactggatgcgacataataagaaaataatgttgcatttttatcgtatggatggaacaaaagctcaatcattccgcacaggatcagaaataatgcagcaactgctcctaattttatgtaagcatgggaatttcccttattggaaattccaaatgcaactgctccaaataagataaacggcagaaaatatgccataaatccgaaaatgccaaaaactaccgatgacaccgtcttgcctacaattccacccagtccaaaattactgaggacaagaaggatacacactgcaagcagtcccagaatgatgatctcccctctgatctcatcccggttctgactttgtccggatttctgctgcgtcttctttgccgtactttttgtattcttctttccttttgttgacttcgcagccatataattcccccttattttcacatacttatttcagtataccatcaattttttttagtgtcatcaaaaaaatgatccggttttgcatccggtttttcctgcttcttttttcttctctcctcatcgatcagttcatgaagtttctgaaacgcttcatgaatccctcccacttcatcgatcattccctctctgacagcctcctctccctccagcattgtccccacatctttcacgagctgcgttgaatccagcatcagctccacgatccgttcctgggagatatgagaatgggacgcaatgaagcgggtaatgcgatcctgggtacgctccatatttcgataactctggatcactccgatgaacattccagaagaacgaaccggatgaataatcatcgtgcctgacgggacaataaaagaataatctgcagatacagccaacggtcctccgatagaatgacttcctccaaggaccagtgatacggtcggttttccaagggatgcgatcatttctgcaattccaagtccggcttctacatccccgcccattgtgtttaaaaggatcagtactccttcgatctcatcattttcttctgcctccgcaagccgtgggagcaaatgttcatactttgtagcctttgtatttccggatacattctcatgtccttcaatctcaccgatgatcgtcagaagctgaatcccatacgggtttcccttttttcccagttccatcgtccccatttcgcggatctcttcattttccttatttctctgttcctgttttgtatccattttttctgttcccatagattccacctcctgcaagttctgaaccatagtatgaacagatttataataaatatgtaggaatacatacaacagtccggggcggaacatacgatctgtatagacactctgccactgtcagtttttccttcataccccggtataaaaaagaagatacaaatgtatccaatttacacttgtaccttctcatcgttattaatcttccaaagcctgctttacatcagcgatcaggtcttcaatattttcaattccaagactgaagcggatcagatccggctgtactcctgcctccagaagttcctgctcattcatctgtctgtgtgtatgacttgccggatgcaggacacagcttcttgcatctgccacatgcgtcacaatagcaaccagtttcagcttatccatcattttcacggcagcttctcttccaccctttaatccaaaagtgatgacaccacagcttccattcggcatatatttctgcgtcagatcataatacttattgccaggtaacgacgggcagtttacccatgctactttttcatgtccctgtagatattccgccatcttaattgcattttcacaatgtcttggcatacgcagatgcagactctccagtccaagattcaggagaaatgcattttgcggtgactggattgatcctaaatctctcatcaactgggaagttgcttttgtgatataagcaccttttccaaatttttctgtatagatgattccatggtaagtctcatccggtgttgtcagtccggcaaatttatctccgtaagcagcccagtcaaaattaccgctgtcaacaatcgcaccgcctacacatgttgcatgaccatccatatactttgttgtggaatgcgtcacaacatcagccccccactcaaacggacggcagttgatcggtgtagcaaatgtattatctacgataaacggaaccccatgcttatgtgccgcctttgcaaatttttcaaaatccagaacgaccagtgccggatttgcaatcgtctctccaaatactgcctttgtattatcctgaaatgctgcttccagttcttcttccgtgcaatcaggatcaacaaaagtagccgtcacacccattttacggattgtatgagcaaaaaggttatatgttccgccatacagggcagatgcacatacaatatgatctccctcttctgcaatattcataatggcataaaaattagctgcctgaccggatgaagtcagcattgccgctgctccgccttccagatcacagatctttgctgctactgcatcattcgtcggattctgcagtcttgtgtaaaaataaccggattcttccaggtcaaataaacgtcccatctgctcactgctggtatagcggaatgtagtactctgatagattggaagaactcttggctctccatttcccggttcatatcctgactgtacacactttgtctcaattctgtaattgctcatttcctcttcctccttgaaattttcttaaaaaatggagcaggctgtcaatttcagcttgctccatatctttttagtaggttatttattcattccagttatgatatacatcctgcacatcatcatcttcatcaagcagatccagtgtcttctggatgttcttgatatcctcttcttttgtaaggtcaacataagtctgaggaatcatcgtaacttccgcagaagccatcgcaattccttcctcttccagcttcagacgtacatcactgaaatcctccggtgaagtaagcacttcgtagctgtcctcttcttcattaaaatcttcagcacccgcatccagtgcaagcatcatcagatcatctgagtccatatcacactcttctttatcgataataatctgtcccttttcatcaaacataaaagatacacatcccggagtcccgacatttccagctccctttgtaaacgcatttcttacatttgatgctgtacggttcttattatccgtcagagtctttacgatgatggcggttccgttcggaccatatccctcatatgtaatacgctcataattatctgcggaaccttccccggctgctttcttgatatttctttcgatcgtatcattcggcatattgttcgcttttgcctttgcgatcacatcacgaagtctgctattattcaccggatcagcacttccaccttcttttactgcaatcgcaagctcacggccgatctttgtaaagatctttccctttgctgcgtcattcttctcttttttgtgcttaatattcgcaaatttagaatgtcctgacatactttcattctccttttctatctgacttaaatcaattaagacttgtacttcatcctgctctccgcaaccagagcattatcttaataagtttaccacgctttttctcatctgtaaagtccacgttcctgtcttatgtaggcagattcaggctgacacagatcgcctcgtctacttttttcatcattgcagaatctatatgacatacatattctttcagtcgctgcttgtcgattgtacggatctgctctaacaggatcacagaattttttactatattataatccctcgtactgatctcgatatgcgtcggaagtttcgctttattcatttttgaagtgatcgccgcacagatgatcgtagggctgtgccggtttccgatattattctggataaccaggacaggtcgtatccctccctgctctgatccgaccacggggcttagatctgcgtaataaatatctcctcgtctgaccatttgttttcactctccaatatctccgttatgttaagctatacttaagtatctccggattcatcggatgtattcacaaattcttcagattcgtcctttaaaaataatctgtctgcgaaatgatttttccattcttcaggtaaacacgtgggattctcttactcaggcagcatacaaattcataattgaatcttccacttaattctgcaagatcctccacctggatctgttcctcctgatcccgtccgatcagaatcacctcatccataaatgccacatcggggatttccgttacatcaaccataaactgatccatacagactcttccaagaatccttgcctttttcccatggatcagcacataccctttatttgacagtgatctgggatacccatctccatatcccaccggaatggttgcaatcttcatctttttctctgtaatatatgtgccaccataactgatcgatgtaccttttcctacttcctttacgaaactgacatgactgaccagacgcagagccggacgcagactcactgcattctgatccacgtcgtctgatggatacattccgtaaatggaaattcccgctctcgcaatatcatgcttgagatctggaaaatcaatgattccggcactgttgtcacagtcaaaatactggatcggaacatttcgttcctccatcagttctttcatccataaaaatttctcatgctgctttaacgtataagatttatccagctcgtcggcttttgcaaaatgcgtaaacattgcctctgtctgcacattcggaagcctgctgatccgttcaatggaagatgcactttcttccgttaccgggaatccgatccttcccattccggtatcaatcttaatatgaaaatacgcagtctttccaagtctttgtgcagcctctgacattccccgtgccatttcttcagtataaaccgcagcacgaatctctttttctaccatctcctcgtattcgtccgggaagacacatcccagtaccagaatcggctttttgatcccctgttcacgcaggacacccgcctctcccatacatgcaacagcatagccccagatatatggcatctcttcaaacattttcgccagcggaactgccccatgaccatatccgtcggtcttgatgactgcgatcagttttccgtcttcgccaatccgctttttcatctgctccatattatatgcaatggcatccaaatcgatatatgcacaaactctgctgtatttcttcatttagttacactcctttgctttcttcatcgctacctgtattccatggatcagatcccttgcgagaacactgtaaccaccttttttatcccttgcctcatctccaccacaggcatgcagaaaaacgcctgtcactgcactttgaaatccatccattccctgtgcgagaagtccggtgatcacacccgcaagcacatctcccgaaccgccttttgccatggctgcattgcctgccagattaaggaagttctgcctgtctttctgggcaactatcgtcctgctgtcttttaagacacagatacacggggattcctcggtaaaccggtgaagtacttcaaaccgccgttctacaatttctgatacagagattcctgtcagccgggacatttctttcatatgaggggtgaggatcatatttttcccaagttttttatacagatctttccttcctgcaagaaggttcagtccatctgcatcaatcacgcagggacactttgctttctctattgtatgcagcaaaatcttttctgatctactgctttgtcctaatccacagccgatacagatgacatctgcccacccgatcagttgatccagtttctcttcatcatactctctatagcaggaaatgatcgcctctggaagaagtccctgaagtacctgcctgttctcttctgctgtatagatctggacaagtccggcaccaaccgtatacgctgctgtagctgaaagataagctgctcctgccattcccggactgccggtgatcataaggactctgccaaaactgcccttatgcgaatcctcttttctttccggcagcagatttcccagctcctttttatcataggtcatgcagacacctttctgttcaaaaaagtactcgggatcaatcccgatcgttaccggaacaacctctcccgcacagatctgtcccggatacaaagcacagccacgcttctgacatgccatagatactgtcagttccgcctgaaatgcaataccaagcacctttcctgtagcagaacagattcctgatggaatatccactgcaaccttctgtgccgtctgccggttcatccatccgatcacatctctgtagtgtcctgcaacttctctgcacagaccaacgccaaaaattgcatcaatgatcacagtatactctttctcggggatttctgtaaacaaattaatcccgagatttttgtcgatctgagcctgcaatctgcattcttccgtcatggagctttctcttcccgtaaaaagcacatccacatggcagcccttttcagccagaagtcttgccacagcaaatccatctccgccattatttccactgccgcatacgatcagtggtcgccttaaatcctttttcttttcttccagtacttcaacaatttttaatgctgccctctccataagaaccacagaaggtacaccgatctgctggatcgtatactgatctgctttcttcatctgttctccgtccggtaaatatctcatgagcagtcccctttcttttaaagacaaactgctgcggaccggtccagctatgaccatacccgcagcagtcctctgctatttttgaatttcattgtgctggctgatattataagacaatttcatcagactgtcagcaagatgtacactctccacaatgacatccttgggaagtgtaagatccgtatgtgcaaaattccagatggccttgatcccattcgctaccaggacatccgctacttcctccgcttttgacttgggaagtgtaagagctgcaatctcaatatcattttcctgcaggtatccttccagttcatccagcattctgacagggattccccggatcgtcactccctcaagacgcggattcacatcaaataaactttttaaaataaatccattccgttcaaatgatgcataatttgccagtgcctgtccaagattaccggcaccgataataataaagttatgatccttatccagtcccagtatctttccaatctccgtataaaggtactttacattatatccatatccctgctgtccaaatccaccgaaattgttcagatcctgccggatctgggatgctgttacctgcatctttttactcaggtcattggatgagatcctctctacacccgcttcaagcaggtctcccaaatatctataatatcttggaagcctggaaattacggcacgtgatatttttctttgttccacttccattgccctccacatcataatctacccaacattatatagaatagttaaacttctgtcaaactttactttcctacttcttgtattttcggctattttcgatataatagatacttggagttttataataatgaagagccattttaaaataagaactatgatataaggagtttattgattatgattttagcctgtcacaatctgaataaagcattcggcgaacataccattgtctgcgacggttcttttcatattgaagaccgggagaaggcagctcttgtcgggatcaatggtgccgggaaatctacgattctgaaaatgatcatcggggaggaacccctggacggtggcgatgttattcttgccaaagggaagactctcggttatcttgcacagcgtcaggatctgacatccggcaatacaatctatgaggaagtaaaaagtgcaaaagccgatatctttgcaatggaagcccagcttcgttccatcgagcaggaactgaaatccttaaccggggaagatctgaaaaaccggctggatacatacaaccggcttcagtctgaatatgaggccaaaaatggctatgcctgtgaaagtgaaatcactggtgtcctgaaggggcttggatttacagaggatgatttttccaagcagaccgataccctctcaggaggtcagaagacacgagtctctcttggaaaactgcttctgacaagccctgatatcctcttactggacgagccgaccaaccatctggatcttagttccattgcatggttggaaacgtatcttttaaattattcaggagccgtattgattgtttcccatgatcggtattttctgaaccgtgtcgtaacaaaagtcattgaggtcgatcaggctcatattcgtatgtatatgggaaactacaaagcctatgcagcgaaaaagcaacagatccgtgatgcccgcctgaaagaatacatgaaccagcagcgtgaaataaagcatcagcaggcagtcatcgagaaacttcgttctttcaaccgggagaaatccatcaagcgggctgaaagccgggaaaaaatgctggaccgtatcactcctgttgaaaagcctgttgaaagcgtccgcgaaatgcacttttctcttgagccgtcctgtatcagtggatcggacgtcctgacagttgaacatctgtccaaacgctttgacagccagcaactttttcaggatatcagctttgagatccatcgcggggaacacgttgccatcattggtgataatggtacaggaaaaactaccctgttaaaaattatcaaccaagtagtctctgcagacgagggatctttcacgcttggatcaaaagtcaaaatcggatattacgatcaggaacatcacgtccttcatgatgaaaagacgattttcgatgaaatttccgatgactacccatccctgactcatacgcagatccgcaatacacttgctgcatttcagtttaccggggaggaagtctttaaacaaatccgtacactcagcggtggcgaaaaaggacgtgtatccctcgcaaagctgatgctgtccgaggcaaatttcctgattctcgatgaacctaccaaccatctggatattacctccaaggaaatcctggaagaagccctgaacaactacagcggaacggttctttatgtctcccatgaccggtattttattaatcagacctgttcccgcattttggagcttgtcaatcagacttttgtaaattatatcggaaactatgactactatcttgaaaagaaagaagaactgacccgggcatacgcatctgcccctgccgtatctgccggtattgctccctcggaatcttcttccgacaatcagacagaatccaaattgagctggcaggagcagaaagaacagcaggcaaaagagcggaaacgcaaaaacgatctgaaaaagacagaagaagaaattgcaaagctggaagaacgaaataccgtaatcgatgaagaactgacaaaagaagaaatttactccaactccatcgaatgtcagaaactttctaccgagcgggctgaaaatgaggaaaagctggaagccttgtacgagcggtgggaagagttggcggaggaagtgtaataaatttgtagttgttggggtgaaaatgattcggtatcaggaaggctttttgacagaagagcgtccatatccgcccttgctgttgcatcgcagtgcaggacccgctttacctcagcccgttgacaacttgtaacaggaatgtggaaacactcgtgcagaggcactcctgtttacgttccttaacaagttgggcaaagtgtcttcggaacgctccttgtcaatgcactgctcacgcaacagcaagggtggatattaggcttttcaaatcagaaaattttccctcataccagaacattttctcccaacaaagacgaaattccaataagaaataaagagccggatggctatcgacgaagataaatgctccatcaaatagtaaatacaatatttacgagatgccagggtcaaaaggtctaagcccacatgagcttgctcataggtgggtgaaagaccttaggctccgccccgatatgagcataaaagtgggatgataatcccacgatatgcgaatattgggtaggattgtggaagtgcgtagcacggagcaatccgtaggcatcaaagtcgggggcttttgcccccgacatctttacgatcgagtatcttagtcaatagccatccggcttttttctattctttttaaatttgcattgttgagtgactacgctgtggagtcagaaaaaaacttcttactgtgactaccagcggaaagcagggtattcctgagcaggtgcattagcagggagcgttccgaagacactttgcagcgtttgttagagaaagtaaatcgagtgccattgcacgaagatttccactttcgagttacaaacggtcaacgggctgaggtaaagcgggcctgcaccgcgaaggaatgtccctgctttccgcgtccgcttcgccacaaagaagctttctgatttacaagcgtatcaccccaacaactacaaattttctaccttaatctcccgctctcatatctgctcttcatctgcagaaaccgaaccagccctgcataccgttcttccaaagattcttcacgttctgcatattccagactttctgcagccgccgtcagaaatcgttcgctcagtacaagcctgtgctttttcagatattccagtttttcttcatttttttcaagatccagaaattccagaatcatcgtcatatcatcctgcagtgcctcggattcacaaatcggagcaacttcttctatcttttcaaaacgatatttctgtccccactcatctgcctgttcccggattaatggactcataaaattcaccagtctgctcacaaaaacttttccctttgttctgttcaccgctacatagacaaccatttcttctctcgtctctgtcgatatggcacaatgcagtatctcataaataccacctttaaaatgacgatatttttctcctgcttctggcttttttctttccatttttctgtttccctctttctgctgtctgcatctaactgtcagattgtactttctgttgctctttaactgaagagtttaaggatcaggaatctgtccttcctgacttttaatataatttcgcactgattgtctttggtctgaatccattttcatccagtgcttcaagaatcttcttcttatggtctgttccaaatgcttccatggtgatacgaagttctaccgctgcgtttcgattcgtacttacaaactgattatgctcaagtttgataatattaccctggacatttgcgatcgtctctgccacgcgtgcaagctcacccggcttatccggaagaagcacggatacggagaaaatacggtctctctggatcagtccatgctgaacgatggaggacatggtaatcacatccatatttcctccactcagtacacagacaactttctttcctttacagtcaagctgcttcagtgctgccacagaaagaaggcccgaattttctacgatcattttatgattctcaaccatatccagaaatgctccgatcagctcatcatcttctaccagaagaatatcatctacattttcctgaacatacggcagattctgatctccgacttcctttacagccgttccgtctgcaatcgtattggcagaatcaagttctacaacttcccctgctttcagtgctgctgtcatgctggctgcccctgcaggttcaactccgatcactttgatcttcggattcagcatctttgcaagtgttgaaactccggtgatcagaccaccgccaccgatcgggacaagaatataatcaactgtcggaagttcctgtacgatctccattgcaatcgatccctgaccggtagcgacatccagatcattaaacggatgcacaaatgtgtagccattttcttctgcaagcttgcaggcatactgatatgcatcatcgtatacatccccatgaagtacaacttctgccccatagctctttgttctgtttaccttgattaaaggtgtaactgtcggcataacaattgttgccttgcatccaaattctcttgctgcaaatgcaactccctgtgcatggttgccggcagaagctgtaatcagtcctctgttccgttcttcttctgtcagcgtactgatcttatagtaagctcccctgatcttgtatgctcctgtatgctgcatattttccggtttcagatatacttttgctcccgtctgcgtactgagatactcactgaaaaccagctttgtaggatttgtcactttcttgacaagttcacttgcttcttcaaatttctccaatgtcatcatttttttcttcctccctgtagaacagtgcctttacaaactcttccgaatcaaacttctgcagatcatcgattgtctcaccaactccgatatattttaccgggatacccagttctgcctgaatcgctacagcaattccaccctttgcagttccatccattttcgtaagaacaattcctgtaatgtctgtcacttcattaaattcttttgcctgtgccagagcattctgtcccgtcgtggcatctaatacgaccagtgtttcacgaaaagcatccggatattctctgtcgattacccggttgatcttctttaactcttccataagatttttcttattatgcagtctgcctgctgtatcacacaaaagtacatccgcttttcttgcttttgcggctgctaccgcatcatagacaactgacgcaggatctgcaccttcctgcccgccgatcatttcaacaccggcacggttcgcccattccctgagctgttctcctgctgctgcacggaatgtatctgctgctgcaagaattacttttttattctgatctttcagctttcctgcaagctttccgatcgtggttgtctttcctacaccattcactccgatcacaaatactacagatgtccggttttcaaactcatacgctgtctcacctacatccatctgctcccggatactgtcgatcagaagctgcctgcattccaacggctcttttatatgctgttcttttactttttctttcagatcttctatgatatccatagtcgcccgtacgccaagatcccccatgatcagggtttcttccagttcttcataaaaatcgtcatcaatcctggaaaatccatgaaaaatactgtccattcctgatacgatattatccctggtctttgtaagcccggataccagtcgcctgaaaaatcctttcttttcttctcccatttctgcctcctacttctccagttggtcttccagaagatctaccgataccagcgtagatactcccttttcctgcatcgtaataccatacagacggtctgctgccgccatggttcctcttctgtgcgtgataacaataaactgcgtatgcttcgtaagtttatgaagatactgtgcataccggtctacattattatcatccagtgccgcctcaatctcatccagcagacagaacggtgacggtttcagattctggattgcaaataacagcgaaatcgccgtcagtgctttttcgcctcctgaaagctgcatcatattctgcagcttctttcccggtggctgggcaatgatcctgatccccgcctccagaatatcctcgtcctccatcagctccagtgtaccttttcctcctccgaataactgacggaatacctcattaaattcttttgcgattcttgcaaactgctcggtaaactgcttccgcattgcagtatccagttcctcgataatctgcacaagtgatgcttcagcctctaccagatcatcatgctgccctttgaggaaagtatatctctccgacacatttttatagtcttcgatcgcatttacattaactgtaccaagtttacggatctcatttttcaaaacctggatctgccgcttcatctctgccagatcggtcagcttttcattccgaagctccatcgcatgattataggtgagttcgtattcttcccacatataattcatctgcttttcagatgcttcttcatatccctctttctgactgttcagacggaacgtctctttatcaagatctgcaatatgctttgacaaatcttcacggagcctcaggaaatctttattcttctgattcagttcttctctctttgaagtctgaccgtgaatctcctgcctgatctcctcaaacagctctttcgactcttcaatggtctgctgtaattcccggatcttttcttctttttcccggatctcctcagatgcatttccccggctttcaccaagttcttccagttcattgcagaacttctggatttcttcctcaatacggatcatattttccaaaataaagttatcctgctgctccagacttgcaagtgaaagatgtacttcctctgtctgcttcagttgtgatccctcttctttttttgtctgttctaaccggatctgaagctgactgatcttttcattcaactccttctccatattttcagaggtctctaattccatctggatcgaatcctcattatccgtaatctcctgaagttcctgcagcagactttcctgttctttctgataaccgtcatatttctgcttggcctctaactgctttaactgcgtctgctcaacattcatcctcgcagtcgtctccacaacagaagccttccggagcgtctgctggatctcatccgtagagctgtagattccggctctcagatctttcaccttgcgtacttcttcttccaaagtatccatctctgtcttcagcatcactaccgtcttttcaaattcttctatctcccggcgtcggctcagcagattgctggaatttttaaatgcacctccggtcatggagccgcccggattgatcagttccccttcaagagtcaccagtctgagtgtctgacgatactttcttgcgattgcgattccatggtcaatctgatcgaccacgatagtttttccaagaagctgttccgcaagtccgctaaatctgctttctacatgaaccagtgtattcgcaagtccgatcactcccggttctcttaaggcctctgcattgcggattcctccacttccccgcatactggtaagtgggagaaacgttgcccgcccgaacttattccttttcagaaattcgatcatcctctttgcagtattctcattgtcggttacaatattctgaatactgccgccaagtgcagtttcaatcgcaatctcatattcttgctctaccttgatgatatctgcaacaactccgatcagccccggttcctgctctttctttgccatcaccttccggatactgttgccgtagccatcgtagcgttctgtaatatttttcagggattccagcctggacgactctctgtgataagcggtctggccgattttcagtttttcctgcttttcacgcagctctttctgtaaccgttcaagttcccgttcattctctgaaatctttgcattacactctgctatttctttctgaactgcctgcagttcttcttcatgctttttcaggatcagattctgttcttctgcctcggttgcaacttccagcaatcctctggcaataactgcttttcttgtctgaatctgttctcttgtcgtatcgaaatgctgcatctttgcagtcgttgatgcacgacttccaagcagctccatgatctcttttttgcactgctcgatctcatctgtatattcagcgatcaaagactgcgtatcaatcagcttctgcctggcctgtgcatcagtcccacgtgccttttccagcttttccagaacattctgcttttctttttccagttcttttttctttgccgtcctggactcaatttctgtatggatcactcctgcacgatgtccataatgctcatcgttcatccgagctgtattgatctgttcttttaagacgttgatctgtccctccagctgctgctttaaaagaccggtctcattcatctgagttcttgctgtctcgatagccagatcaatttcttcaacctgcccctctatccggtcatactcctctttcatcttctcataacggacatttgcttcttccatctctgctgcagcaagctcgtatttccccgcaacatccctgatacgttctctcagccgttcttcctccagaaggaacatattaatatcataagtcttcagttcctctttctttttcagatattccctggctgtctcggactgacgttccaaaggtcctaactgcttctccagctcctgaaggatatcatttaccctggtcagattctgccgttcttcttccagtttctttaaagaaagattctttctccgcttatatttcacaattcctgcagcctcatcaaaaagttctcttctctcctccggctttccgctcaggatcttatcaatctgtccctgaccgataatcgaatatccttcctttccgataccggtatcgtagaacatttcattaatatctttcagtctgcacgctgtaccgttaatcagatattcactttcacccgaacgatacagctttcttgtaactgtaacttctccgtactcaaccggaagcttatgatctgaattgtccagtgtgatcgcaacagatgcataacttaacggtttcctgttctccgtccctgaaaatataacatcctgcatacttccaccacgcagttgcttcactctctgctctccaagtacccagcggaccgcatccgcaacattactctttccacttccgtttggtccgacaatcccggtgatcccattatgaaattcaaactttattttattcgcaaaggacttaaacccctgcacttcaatgctttttaaatacataaagcccccgcttatttcatacttctatacatgatgatcgcctgataagcagctttctgctctgcagctttttttgaacggccttttccactgccataaggctgtccgccaatcctgactctcacttcaaatgtcttattatgatccggtccttcctcaccaaccagctcatatgtaatatttcctgctttatttgcctgtacgatctcctgcaagatagttttactatcataaaagagtttcttatcctccagatccgtcaggataaaccgatggataaactcttttgcactagtaaaaccaccgtcaagataaatcgccccgatcagtgcttccatcgcatctgatgtgatcgaatctctcattcttccacccgttgcttcctctccttttccaaggagaagataacttcccagatcaatgtctctcgcacacattgccaaagatggttcgcacaccatactcgcacgtgtcttggtcaattctccctcggatactcttggaagttccccaaaaagatattcgctggagatcagttccagtactgcatctcccaaaaattcaagacgctcattgcatctgtatttttccagatgcttttcattcgtataagaactatgcatcatagctctttcaagaagcttgtgattttcaaaagtgtatccgatctttttttccagttctttcagtcttttatccataattcacttctctttcttttatacgctcctgtattgaaaatgaaaaagcccattcgggctttttcatctcacttccgattattcaacagccttttttatctgctcaactgcatcctgcacagttgtgatcttttctgcttcttcattgtcgatctcaatatcgaactcttcctcaattcccataatgatctgaaaaatatccagtgaatcagcacctaaatcatccacaaatgtagtctccggtgtaatgtcatctttcggaacatttaatacgtccgcgataattgcctgcagcttttcaaattccataattaaaacctcctgaattacttctcttctttttcttccacaacttcctgttggattgcttccctgatcttttcattgatcttctgttctttaaacgtcacacactgaatgatcgagttgcatatctctgttgactttgaacttccatgcgtcttcactaccagtccattcagtccaagcaggggtgctccgccatgattacttgtatcaaaatcctttaatacctttttcagtgccggctttacaagcaatgcaccgatcttactccgaagagaagacatcatgccttccttcacctttttcataagacctcccgcaacaccttcataaagcttcagaatgatatttcccgcaaatgcctcacagacgatcacatctgccgcaccatacggaatatctcttgcttctacacttccgataaaattgatatcgctgcattctttcaacagtggaaatgtctcttttacaagtgcatttcccttctcttcttctgccccgatattcacaataccaactgtcggattcttctttcccataacactctccatatatatggatcccatccttgcaaactgaacaagatgggacggccgggcatctacattcgctccgcagtcgatcagaagtgaaactcctttcaaagtcgggataagcggtgcaagcggtggtctctcaacccctttaatacgtcctacaagcacctgacctccaacgaggactgcacctgaacttcctgcagatacaaatgcatctgcctcgccctttttcaccatcttcattgctactacaatagaagaatcttttttcccacggatagctttcaccggcggctctgctgtctctatcacctctgtagcatttacaatttcgatctgttcctttggataagtataagcagacagttcttttttaagaacctcttcttttccggtcagcagtatcttgatatcatctcttctctgaactgcttctactgctccttttacaatctctccgggagcattatccccacccatggcatcaagggcaactctcgttatctcagacatattctttcctccttgcactactgaaattattctactaaaaaacctgataaaaatcaataaatatgtataaaaagggagtttcctcttaagcaaaaaatagagtgtaaacctttcaggcttacactctattctcagtttcaaatcataaattagtcaactgttacgatctcacgcttgttgtatgatccgcatgccttgcatacacgatgaggcatcataagctcgccacatttgctgcactttacaaggttcggagcactcatcttccagttagctcttctcttatctcttcttgcttttgaagatttattctttggacagatagacataggttacacctccttaaaattcttaaataagtcacggacaactgacattctcggatcaagtcccggttcttcacagttgcaggaccccgtattcaaattctgaccgcacactttacataaccctttacagtcttccctgcacaggactttaaccggccagtctgacaaaatctctccatacaggagtttgtccacgtcaagatgatatccgtcaataaagtttgattcatccagctcctctgtcagttctgcgtcggagaggcctacgtccacatgctttgcacaatcaagtacaaactcccttttcacatcatccaggcatctgtcacatggtatcgcgactacaatcctggtctcagcgttcacgagcagttcttttccccttatatgctccactctaacatgaaccggctctttactgataatggggtaggttccggatttcatccggatctcttccatctccagccgcacagtttcttcaaccgtcttatgctggtctgacaaaacgtctgataggttaattaacataatgtatttctcctattcatacctaaattattatatcatggaaaacttttttgtcaacctaatttttaaaaatctttttctgctgcatgaaaaagggcagttatgttctctcaaactttcctgccctgttaataatcagattttttaatcttttcagatcataagatgccagggtcaaaaggtctaagcccatatgagcttgctcataggtgggtgaaagaccttagggcccgccccgatatgagcataaaagtgggatgataatcccacgatatgcgaatattgggtaggattgtgggagtgcgtagcacggagcaatccgtaggcatcaaagtcgggggcttttgaccccgacatcatcataattttatatcttgttattatgaagtttattttacaagtgcaagtgtctcacgtgcaatagcaagctcttcatttgtaggaattacaaagactcttaccttgcatccaggctttgtgatctcaccctgctcgcctctgaacttctcattcgcatcaggatcaagttcaacaccaagatatcccagatagctgcatacctgctctcttacatagcttacattctcaccgattcctgctgtaaatacaatatcatccacaccattcatcgctgctgcataagctccgatatattttgctactcgataagcaaatacttccagtgcgatctttgctttcttgtctccttcagccattgctcctgtcaggtcacggaagtcactggagatttcgcctgagagtccgaatacaccggatttcttattcagtacattcatgatgccttcgatatcaagattttccttctgcgcaataaactccatgatcgccggatcaatatctcctgaacgggtacccataaccagtccctcaagaggtgtaagtcccatggatgtatcaacggattttccattgagtacagcagatacgcttgcaccatttccaaggtggcatacgatggtctttacttcatcatatgcttttcccatcacctcagccgcctttttagaaacatagctgtggcttgtaccatggaaaccataacgtcttactttatatttttcataatattcatatggaagaccatacatataagctttttcaggcattgtctgatggaatgctgtatcaaatactgcaaccataggagttcccggcatcagcttttcgcatgcttcaactccgatcaggtttgcaggattatgaagtggtgcaagatcattacactcttctacagcctttttcacttcctccgtaatcacaacagaagacgcaaacttttcaccgccatggacaatgcggtgtcctactgccccgatctcgcttaagctcttgacaacaccagtcttttcattcgtcagtgcatcaatgacaaactggattgcttctgtatgggtcggcatggccttttcagaaatttctttttctccgccagccggctgataagtcagacgtccgtcaattccgattctttcacaaagtccttttgcgagtacctcttctgattcagcgttgatcaactggaatttcagagatgagcttccgcagttaataactaaaatattcattttcttttatttcctcccgaaacaaatcttaccattcttacttattcagcctgtgcctgtactgctgtgattgcaacaacacctacaatatcttccgcactgcatccacgggaaaggtcattgaccggtgctgcaattccctgagtcagaggaccgtaagcttctgcttttccaagtctctgaaccagcttatatccgatattacctgcatcgaggtcagggaatacaagtacatttgcatgtcctgcaactttgcttcccggtgctttggatgctccgacttccggaacgatcgctgcatcaagctgaagttctccgtcaagtgcaagctccggtgcaagtccctgagcaatttttgtagcttctactaccttatcaacatctgcatgctttgcacttccttttgtagaatgagaaagcatagcaacaaccggctcttttcctacaagaagcgtgaaagaatctgctgaagaaattgcaatatttgcaagcttttccggatctggattctgctccagacctgcatctgcaaatacaaatgttccgtctgcacccatatcgcaatccggaactaccatcaggaagaatgcggataccagctttgtacccggtttcgtcttcaggatctgaaggcacggacgaagtgtatctgctgtagaatggcatgctcctgataccataccgtcagcatcccccatcttcaccatcattaccccataataaaggtaattattcagaagcagctcttttgcctgctccggtgtcatacctttcttctgtctcagttcaaccagttttgcaatataaccttctgttcttgcatctgtagcaggatctacgatcgcagcaccggagatatcatatgtacctttatttttctcaatctcctctttgcttccaacaagcaccagatcagcaattccttcttttaatactgcctctgctgccttataagttctttcgtcctctgtctcagggagaacgattgtctttttgcaagctttcgctcttgccttgatttcatcaataaatcccatgacttttgtgccacctttcttttaatttcactgcaatttattataatacaaaggttttttgtatacaagtgggtttcatgtgcattttcaaatacaatctttcttttttcagatctttttttatagctttgttacatatttatcaatgtcagacaaattgttcttcaaaaagaacaatctctgtctctttcacacattttcatagatgaaaaaatgctgtcacaatattaaaataaaccagaattgtacacgtatccagtatggtcgtgatcaacggtgccgccataattgccggatcaagccctaactttttagccaacagaggaaggacacatccgatacattttgccatcgatacaacagcgatcatcgtcagtccaagtgcacctgcgagcatcacattctgatcatacataatatagatgcgaagtccatttacaaccgcaagcatcagacctacaaccacagctacccggatttctttgaaaagcacccggaaaatatctttaaactcaatctctcccactgcaagtccacggatcaccaatgtcgaactctgagagccacagtttcctcctgttcccatcagcatcggaataaatgtgatcaataccggcattactgccatggcatcctcataatgcccgagtatctctcctgttaccgttgctgacagcatcaggagcatcaaccataaagaacggttctttgcatgctgaaatactgaagttccaaaataagaatcttcattcggactgacacccgccataatactgatgtcctctgttgtctcatcctgcaaaacaagcatggcatcatcaactgtaacaattcccaccatgcagtcttcatgatccaggatcggaattgcaacaagtccgtatttgttgatctgattggccacctgttcctgatcatccagcgttcttgcataaataacattctcatccatgatctcctcgatcagcctggactcccccgctgtcagcagatctttcacatccaccactccgatcagctttctcttttctgtcacataacacgtataaatcgtctcacggttgatccccacctgccggattttaaggatcgcatctgcaaccgtcatctctttccgcaggctgatgtattctatattcataatactgcctgcactgtcttccggatattgtaacagagtattgatctgctttcttgtctcctcatccgttgccatcagcagacgatccacaacattggccggcatttcctccagtacatctactgtatcatccacatacatctcatccatgatctcttttaactcagaatccgtcaatgcttcaagcagttcttccctcatatcactgttcatatcagtaaaaacttccgctgcttcttcctttgaaaggagacggaataccagcattctctgcttcttatccagttcttccatggcatcgacaagatccacaggatgcagattttccaattcctctttcagttctttaaaattacgttcttctaaaaattttataatctgatctgcagtcagtttctgttcctgctccatgtctctgcaccttcttcacttaaattttgaccctgctatctttttatagtataataggttcaaaaatgatatacaagtattaactgatagatatagtattgcaataggagatttctatgaaaattgttggtctgatcacagaatacaacccattccataacggtcatttataccatatccacgaatcgctccgcattaccggtgccgatgctgctcttgttgttatgagcggcgattatgttcagcgtggtactcccgccattatgccgaaacgtctccgtactgaaatggctctttattgtggagctggagctgttcttgaacttcccgtctgctatgctaccggaagtgctgaattttttgctctcggagcaatttctcttttagacagtctcgggatcgtcgattctgtctgctttggaagtgaatgcagtgatcttcctctgctgcagaagattgccggccttttagtcgatgagcctgaacaataccgtgaaattctccggcatgaattaaagcttggcaaatcatttcctgcagcacgacagacggcagtcgttttctgcaccggcgatcctcgatgtgccgacattttaaaagatccgaataacatcctcggcattgaatatctgaaagccttaaaaaaatgcggaagttctatccgtccttatacaatccggcgaaagggagcaggatatcatagcagccaacttgacggactgtatagctctgcttctgcgatccgttccctcctgtcatattccagctcgtccattcatacagaatttgcaggagatgattccacagagctttctttttccgatattctcaatgaactgggaaatcaggttccaaaaaagtgtctggaacttctgtctgattttcataagatccagtacccggtttatcagaatgatttttcattaatcttaaaatacaaacttttgaacaagcatcctaaaagcctcgtccgttatatggatgtctcgcccgaactcgccgcaaggatctgtaccagtttaaatgatttctttaattataagcagtttgccggacttctgaagacaaaggaactgacccaaacccgtattaaccgggcattgcttcatattatgctcggaatcaaaaaagattctgtatctgaatatatgaacagcggatataacttctatgcacgactgctcggattcagaaaggactgttcccagattcttaccgaaatatcaaaaaaaagctccctgccgcttctgacaaagcttgctgaaagccgggaactctgtgagcttggacagcgaatgctgcgggatgatatcctcgcatcaaatttatatacttccgttgtgacagacaaatttaagacagcatttctcaatgaatataaacagaggataatcaagatatgaaatttgtagttgttggggtgaaaatgtttcggcagccagaaagattttaatagaagagcatccatatccgcccttgctgttgcatcgcagtgcaggacccgctttacctcagcccgttgacaacttgtaacaggaacgtggaaacagtcgtgcagtggcactcctgtttacgttcctgttacaagttgggcaaagtgtcttcggaacgctccttgtcaatgcactgctcacgcaacagcaagggcggatattaggcttttcaaatcagaaaattttccctcatgccagaacagtttctcccaacaaacacgaaattccaataagaaataaagagccggatggctatcgacgaagataaatgctccatcaaatagtaaatacaatatctattatctgatatttacgatcgagtatcttagtctatagccatccggcttttttctattctttttaaatttgtattgttgagtgactacgctgtggagtcagaaaaaaacttcttactgtgactaccagcggaaagcagggtgttcctgagcaggtgcattagcgtagagcgttccgaagacactttgcagcgtttgttagagaacgtaaatcgagtgcctttgcacgaagatttccactttcgagttacaaacggtcaacgggctgaggtaaagcgggcctgcaccgcgaaggaatatccctgctttccgcgtccgctctgccacatagaagttttctgctttccaagcgtatccccccaacaaatacaaatttataatctcttcgcaatcgccttaataaatccttcactgttcagtacggttggattttcaagtgttgtgatcagtgcgagatctttcgtcatttctcctgcctcgattgtatcaatcgttgccttttcaagcttatcagcgaactccatcagttctttattgccatcaagctctcctctttttctgagagcacctgtccatgcaaagatcgttgcaacagagtttgtagatgtttcctctcctttcagatgcttataatagtgacgctgtactgttccatgggcagcctcgtattcataatatccatccggagatacaagtacagaagtcatcatggcaagagatccaaaagcggaggataccatatcactcattacatctccatcatagttcttacatgcccagatatatccaccttctgatttcattacacgggcaactgcatcatcaatcaatgtatagaaataggtgattcctgcttctttgaacttctcatcatattctgcatcataaatttcctggaagatatccttaaatgtatgatcgtactttttagagatcgtatcttttgttgcaaaccacagatcctgctttgtatccagtgcataggagaagcagcttcttgcaaaactttcaatagacttattgatattatgcattccctgtacgattcccggtccatcaaattcatgtaccagttcttttgtctgacttccatcttctgctgtataaaccagctctactttccctgctccaggaattttcatttcagatcctttatatacatcaccatacgcatgtcttgcgatcgtgatcggctttttccagttcttaacacacggctcaattccctttacaacaatcggtgcacggaacactgttccatcaagaattgcacgaattgttccattcggacttttccacatttctttcaggtcatattcatccatacgtgctgcattcggagtgatcgttgcacattttacggctactttgtatttcttagtcgcaagtgctgagtcaatcgttacctgatcatccgtctcatttctatgctcaagaccgagatcataatattccgtcttaagatcaatgtatggctctaaaagattttctttgatcatcttccagagaatccttgtcatctcatctccatccatctcgaccagtggggttgtcattttaattttttccattgtctgtttcctcctgcttatcatttatattgactattcattcgtagttctgaatgagtaattcacggatccgattttctgccaggctataactcagttttctaatagccctgccttttcaaattttgtattacatgtaaaatatgttcatcagctaattgttctgcctgatcggcatctctttctttaattgcctgaaggatctgcttatgctcccgaattgattttctcgcccgttcttccgacacgattgaatcttttcttgccgactggacatattcatggaaatctgataaaactctcgcaagcatacgactgcctgatgcctcatacaaaattgtgtgaaaccgtccgtccagccctgtcacctgctctgtattaaaagcatttcctttcttcatttgaaattctgataacagaatcgtctcttccagtctgtcaatctgttcctctgtgatattctccacagcccatcttgcacaaagcccctctaatgtagacctcatataataaatatcccagatatcttttttcgagatgccattaacataagctcctctgttcggcacgattgaaaccagtccctccagttccaactgacgaagtgcttctctgaccggagttctgctgactccaagctctttccccagcgttgcttctttcaattcatcattctgcttatatttccctttcagaatatcttcacggattctctggaaaactcttcctccgagcgaatgttcctgatgctcttccattttgtctcctctcatcctttttcccacagcgggcaatgcactgaccaacgatacattccagtatctctttttctttgcattcttgtataattgtatacaattatacatcttttgtcaagtttcgattcgagaaattcatttatccagatttttcaaaaacattccttgtcttaagaaaccccaaaggcacgttcttatgtaatctgatatgctcccttttaggtagacaagtaaaataataaaaacttgtttcctgaaagggggtatttttttgagtagaaaagttaagtacagcatagaagaaaaactaaatgctgtacaaaattatttagatggtaaagagagtatgtattccattgcgaatagatttggaattgatgtatcttccgttagtctgtgggtgaataagtacaaagcgatgggtgtggatgcattttctacaaatcaaaataagcattataccaaagaagaaaaggaacaagcgattgcagcatatttgcatggagaaggttctcttatgagtatctgtaaaaaatttaaaattcattcaactactcaactcaggaactggataaagaagtataatggtcatgaggagctgaaagcttccgaaacaggaggaactgtcatcatgaccaaaggaagaaaaaccacatttgaagaacgaatagaaatcgcttcatattgtatttcgcatgattataattacgctgaaactgctgaaaaattttgtgtttcctatcaacaagcacgaaactataccgtaaaatgtgaaaatggcggaattgatgcgttgcaagataatcgtggcaaacgcaagccggaagctacgcttactgaaatagaacgacttcgtgctgaattaaagttggaaaaagccaagcgacaaaaagctgaaatggaggcatcattcctaaaaaaactcaacgaaatagagaggaggcggggctaagcctgctacgacacaaacatatttatcaggcgattaaagaagaaaacgaaacatacggatatccaattagtgctctttgtaaattgggaaatgtaagtagagcagcctattacaagtggttaaatagggaaattccgactaatgagatagaaaatgagcgtattgcagaaacgattgaacaaatacatacagactctctagacaaaggttaccgaagaatacgagacgacctagaacgctatcatgatataaaagtgaatgataaacgagtacttcgcatttgcagaaaaaagaatatcaaatcaacaattaagtactcaaacaatggatgcacgcgtcaggctgcaaatccacaatttatagctgaaaatgtattgaatcgagaattttatgctgatgctccaaacgaaaaatggcttactgatgttacagagtttaaatattataccggacaagaaaaacacaaagtatatctaagtgccattctggatctttatgatagacggattgtatcctacgtaattagagacagcaataataatgcgttagtatttgatacttttgacaaagctattgaaagtaatccgaatgctcatccattgtgtcattctgatagaggttaccaatacacaagtcgtacttttcacgcaaaattagaagctgcaggaatgactcaaagtatgtccagagttgcaaaatgtattgacaatggtccaatggaagggttttggggaatcctaaagagagaacgctattacggcaaaaaatttactgatcgagaatctcttattactatgatcgaagattacattgagtattacaacacgaaacggttacaaagaaatcttggagtattaactccgtttgaaaaacacgaacagtatatgttggcggcataaaactgccaccagtttttcgcatctggtggcagaaatagtttttgtttttttgattgtctacttgacgggaagcagttcaatctacataaagatcgtgccttttagtttcgataatgattctcctctgtgaacccctcttaaatattatctttgtgcttttttaacttccatgcagcaagcaataacatcgctgaagtaacaaataataaaactggtctttctgcattcagaggatcgcctgtcttaaccgctgtatcatctttttctgaaactgaagcatccttatttcctgatccctgatctccatttgatggtttatcagatattgatggctgatccggtttggacggctggtcaggatttgatggctggtcaggatttgatggctgatccggtttcgatggctggtcaggatttgatggctgatccggtttggacggctggtcaggattatctgtacctgcatcatttttctcaaattttgctgaaacacttactgctcctgccggcatcacaaatgaataactatggtctgcttcctccgtaagctctaccacggaatcatcttccattactgcctttacacccttaagtttatatccgtcatctgcggatactataatagtgatcttgtctccttcttttgcctcattttctgaaactgtgagacttccgtttttcggctgaaccactgtaacagagtagctcttttccgactccggttttgtactgtaattctgcaacgctgcagccagctctgctcttgcattctctgtctcctcaagtgttgcaagttgattattcttcaatgaagaagcatatacggctgcttttacaagactggattcggatgaatccgttgactcaaaattgagtccatctttttttattaactcttctgcctgcttcagcagtgtatttaactgagttttatcaactgtctcatatactttaaattcctggatcatgtatattcctgcagatgcattagatgcaattccctgcatttttacatatcttgcctcagttggttcatcaaggcttactgtattgaagaaatcaccatttccgcgtactttttttgcagttgtccagttctctccgtcatccgatacaagaatattaaaatcttttccttttccaccgtatcgccactgaatctcaacttcgctgactgttctggtctctccaagatccacacataaagagctgtctgcatgatagcctttccaaaatgaattcatctctgaagtacttgtatccggcttcgctgttgtatcttctttttcagtaaatgcatctccgtcaaatgccttaaaagcgacgttgattcttcgttctgcattgtcaactgcatctcctgatttgtaagaagtaccgcctgctgctttattctgtgcgacattcgtcttaactgtagtttcaccccagtcatctgtatagtattctgccgcctcttctgctgacagagcctgattgtaaacctgaagatttgccatctttccatgcaggttttctccgatcttttccaacggaagaagaactgaagaattaagtgttgttattgcaccgcttgccagtccgtctgcatctgacttctgtgaaaggaaggtctgcaactgtccatttacataaagtttcgttccctggaatgttcctacgagcatgatctttactgtagaatcatcggtcggtactgtatagttgaaatctcgtgtaaagtaatttacattggctgataaatgaccgctctctgttcctgcaatctgaatctgtccatcataacctgaaaacagggaagatgcggttgtattttttgcagcttcttccgaatctactttcaggtcaaatgctactgtatatggataagaaagcgtcttaagcggagttgtcagtgctgtaccgtcaaaagacaaatatccgtcttcactgatctctgctccatttccaagcgttccgttatagccgttaccgcttgtatcataaactgtctttccatcagaagatacattcttgaaatcataatccagtaccagggaggagtctgaatccacctgcattgcaatgtctgttcccggtccttctgcaagttttgcagctctcatctcatactgctcaaatgtatctgaatcatccgttcctccccaggtcttttcgcttacaatcgctgttgctctgaggactctctggtgaacatccttttctgtcataccttcctggctctgatctccccagatagcagcctttgctccaagaagatttggctcacctaaaagtacattatttgctccaaaaatcgttggattccagtcattgaacaaatattctgcatttggtacatcacggtttgttctgcccggatttccatataaatatgcgtcacggcagtttacaattccatatccctctgctgcacgtgcctttgcattctcataatttgttgcccagatatccaactgatagttggacgtaagatccacatcagaaagtacggtagatgctgttgagaacattcctgttcccgcaccccacattctgatctttgtatcagatcccaaattgccctgaatcgtctgtctgagctgatccgcaaactgtgcgaactggtctttcggggtatgatcccagtattcatccgctccaatatgtactacatctcctgaaattgtcggggaatcgccctctgtatactcattccataaagtctttgcaaagcggagtgctctttcagcatttgccccctgcagatccagaagctccagacctccctttgtagttacattgctacttgtgctgcggattcctccctgcagccagtcaatgccatccggattttcatctgcatacttattatataaaagtgaatgtcccggaagatcgatctcagtcatcatatgaatcccgagacctgaacatgtctgctgcaattccttccactcttccttcgtgtaggtcggattgccctgataatctgcattattcagataataatcctcattcacaaaattggatgggattcccgcgtgcttcacttcagatgtcagtgacggaaattcatcactctccagccgatggaatccggcatgtgtctcattgcttgcaaacgctgtattacagttatcattatcattaatgtggagatgatattcgttcatcttataccacagcatgatcttggcataatcctgaagttgtgacagtctgtatggtgtacgtgccacatccagcatgattccccgtacctcataagccggataatctctcgtaataccttttggaactgttctgttgtcctctgcctgatccaggatctgctccaccgtgatcgttccgtacagacatcctgtataggtaggtgcataaatgtgaaccccctcatcatcagtctttaacagatagccttcatccccaactccgtatgtatcatcggtctgtgactcaatataaatatcattggaagaagccggtgcatttccctcttctacagtaagatccagtcctgcgatttcctttaaatcttcctgcatattccatgctgcttcgcgaatccctgcatctgcagtatcattataaataatctttgaactttctgtcagctcaaaatccccctcatatccataccactcctgaagacttggaattacttccggcttttcatttggagctgatacttccgggaaatttccttccggataatttccgctgtgatccgggatcgttacttctatattcttctccgcatattcatccggattctttttattctctactctgacaagcagtgtgacattgcggtcaccgatattataatcactgatctgaccgtcattgctgactacattctccaggctgctgcctctcacataggcattcacacccctggctgttcctgtatctacagtgatctgtccatcctgaacctttaaagaatctgctgtgataccggccagcgttccgttcacatctgcactttcattctgggaaaagatctggatttcccgaagattgacattatttccgactgcctgtgcatttactttcctgatatacattaagacatatcttttcaattttttatctgatgccagtgccggactgctggttgcagtaattgtatcagtatttgcacttgtatcggcaatattctgcccttcaccattggcaacctgaccgttcgccgaaggtctgctgacgctgacaagacttgtccagttattcaggtcaacatccgtactcccctctgtaagtgttgactcatccgctgtataaatctcatattccatcggccatactttcacattataccaaagcttgattgacgaaatatcttcttcctctgcatcttctccccggtcgatctgaatccactgagcagtctgttcttcagaatccttgctgttccctgatgcagctccccagttcttcatatctgcagaattccactgaactgcctctgaggtaactccatccacagcatattccggtccataaccgttcgctgtggatgaggcgatcgccgccttcccctgaacaagattctccatctgaacattttcttcagcataaactcctgacggaacgtatgctgtaacacctgtaaatacaagtgaaaccgccgcaatgagagaaatcagtctcttctttttcatacaacttcctctcttccttccatttgtataattctcatataactcatttgtgcaaaattgtaccacattttggcaaaaaatccaatcaatttatgcaatctttctataaataaaagcgaataccatcaaaaaagcaccaccccatgtgatattgacacaggatgatgcttttgacaacattcgctctgtaattattttctaagaccaagtttctcgatcaaagcacgatatctttcgatatcaatcttcttaaggtatgcaagaagtcctcttctctgtcctaccatcttcagaagtcctcttcttgagtggtgatccttcggattagccttaaagtgatctgtcagctcgttaattcttgctgtcaggatagcaacctgtacttccggtgatcctgtatctccctctgttcttccaaattctttgatgatagcctgtttcttttcttttgcgatcatgttcttttcctccttaaatttcttgatataactgcctggcattaagcaatggtcggagtgatccgattaccgaacaccggctgattcataacctttgctagtatagcacaggggaacattcttgtaaagaactattttccagaatcatttgcacagaatcatttctgcatgtaacatgccctgatgaatactctctgaatcctgtctctgcagctatatcctgatccatcagctttttgtcagtggatgttctcgaagatattcctcaccatatcgcatatcctgcatcacgcacgctttcagttctttcaaagaatcaaatcttgtctccggtcgctcaaattccaggaaccggatcgtaatgtacttcccatatgcatttcctgcataatcataaacgtaaacttcaaacaattctctctgttcctgcgttaccgtcggcttgactcctgcatttcccacaccaccataccatgttccgtcaatcagaacctggcaggcataaactccataccgcggaagaatcttcccatcctgtggtgcaacattcatcgtcgggaatcccagagtacgccccagttcccgtccatgttctacaattcccgtcatctcataaggatatccaagaagttcctgtgccagccggatatttccatgggacaaagcctcccgtacataggtgctgctgatctcgcggtctcccaaacgtgctttttctaccacatcaacagtataatcatatttctgtgcatatcgctccagcatctgatgatccccgcgttttcgatacccgaaggagaagtccgaaccaacgacaatatgtgcagcatgaagtttttcgtaaaggattttctgaataaatcgttcagcttccatcgtcatcagatctccggtaaagggataatcgatcaggtaatccacctttccagccagtagtttttttctttcttcttttgtcatcagacagcttctctgcatatcaaatgcacatacaacactgacgcagtcgtttcccgcataagagcggatcttttcaatcagtttctgatgtcctctgtgaagcccgtcaaattttccaagagttacggctgttcttttttcctctctgaaagcatcaattccttttatatactgcataattacctcaattcttccgggtcaaggaacatttttacaaggtggaacatttttttgtcttccatataccggtaaattccgataaaatgtccctttgcatcatatactctgaccttttcaccggagcagaattttccagtttccgataactggtttctgaaaaaatcatttccattataggctttgggaatatatttttcagcagggacaacggactgtaattcactgaacatctgatccagtgggatcagtgcatcttccagcccgccattttgtgcaaggtcacgcagttcctctaatttcagactgtctttcaactcgaatcttccgacttttgtcctggtcagttcttccatacagccacctgttccgagcagatttcctatatcatgacaaagagtgcggatatacgttccctttgaacatgtcacttccatccttactctcggcaactgtatttctttgatatggatctgataaatggttacttttctgcttttacgttctaccgtctttccctctctcgcaagctcatacagctttttcccattgactttcagtgcagaatacatgggagggatctgatcgtatgtgcctttgaagctttcaatcacttttatcacttctgcttcattcagatggtctgtcggctgttctttcagtatcgcccctgaaatatcctgcgtatccgttgtctttcccagtaacagtaccgcctcataagtcttatcgcggtctgtcagaagatcgcataactttgttgcacgccccagacaaacaggaagcacccctgtcgcatcaggatcaagggtgcctgtatgaccgatctttttctgaccggcaatcttacgcagaacggcaactacatcatgggatgtatatcctttttctttatatacatttataattccgttcattcttagtcttcctgttctattttttcatctaattgcttttcgatcaatgctgtcagattattgatgacatcatggacggaacctttcatcgtcactccggctgcacggacatgacctccgccaccgaaatattttgcgatcctgcttacatcaacccgttctttggatctcagactcactttgaaagtctgtggagcagtttcatgaagaaacatcgccacctctactccttttgtctgacgcatctggctgacgataccctcaagatcagacggttttgcctggaaaaattccatttctttcagacgcaccactgaaacaatgcaccgttgatccagcaccataatgctttccaaaagtgcccttccaagaatctgattctgcacatacgtcttttcataatatgtccgatccgtgatctttgcagtatcgacccctttccgcatgagctgtgccgctgcctccatcgtctccgggctggtgcaggaatagcggaaaattccggtatcatgagcaattcccatataaagagcctctgccgtctcaagactcattttatcataatccagcagattatataccagttcagaagtagaacttgcatccggcacaatataattgacatctgcaaacgcctcattgctcacatgatggtcaatgcacgcagtctgctttgattctatgaataatttctgggaaaatccaagacgctgcagatccccacagtccatacaaatgaatagatcatagattttcccttcagggagctcacttttgacttcatcggtatgacggatcatactgtaagcctccggaactgattccaaatacagatctgtctcaatctgcggaaaattttctttcagataaagatacagtcccatcgtagaacctacacagtcgccatccgggcggacatgtccgcccagtgcaacactctgttttccctccagcaattccttcagattaaacatcctgctcatcagctccatcctttaaatctcttgtcacttcatcgatttttttactgatattcacaccatattcgattgactgatctacgataaaccggatttccggtgtatttcgcatattgatcgtacgtgccagttcgcggcggatatagccttccgcactctgaagtccccggatggtatcctgctgggctttctcatcacccagtacactgatataagccttgcaggtcttcagatccggagctacctccacggcaactacagaagtcatcggtgcaacgcggggatccttgatccctgcacgcaggatattgctcagctcacgctggacttcagcattgacacgagtatttttaatactgttctttctcattgctgctccttttacttacgctcagtctcgaccatcttatatgcctcgacctgatcgccctctttaatatcattataattttcaaatacaaatccgcattcgtaacctgctcttacttccttcacatcgtctttgaaacgcttcagggatgcaagtggtccgtcgaatactacaatgccatcacgcaccagacgtacagaacagtttctctcgaaaataccatccagcacatacgcacctgcgatcgttccgacaccggatgccttgaatgtctgacgcacttctgcatgaccaagcactttctcttcaaataccggatccagcattcccttcatagctgcctctacatcttcgattgcattgtagataactctgtaaagtcttaagtctacaccttcgcgttctgcaatttcttttgcagtcgcatccggacgtacattgaaaccgataatgatcgcattggatgccgatgcaaggatgacatcagattcgttgattgctccgacaccaccgtggatgatctttactacaacctcatcattgctcagcttcagcagactctgcttgattgcctctactgatccctgaacatctgcctttacaacgatatccagttctttcaggttaccctcctggatctggttgaacaggtcatccagtgacattttggattttgtctcttccagaagttttactttgttctgtgaaataaatgtctcagcaaatgctcttgcctctttatcagaagcacatccaacaaagacttctcctgcattcggcacatcattcagaccaaggatctcaaccggctgggacggacctgcttctttgacacgtcttcccttatcatccatcatcgctcttacacggccatgtgcacttccggctgcgatagcatcaccaacatgaagcgttcctttctgtaccagtacagttgcaactgctccttttcctttatccagctctgcctcgatcacaagaccacgggcagcacggttcggatttgccttcagttccattacttctgctgtcagaaggatcatttccagaagctcctggattccttcttttgtgtgtgcagataccggtacgaagatcgtacttccgccccagtcttccgggatcagttcatactctgtcagctcctgctttacccgttcgatattggcacttggcttatcaatcttgttaatggcgacaataatctcgattccggctgcttttgcgtggttgatcgcctcgatcgtctgcggcataacaccatcatccgctgctacaacaaggatcgcgatatccgtagaatttgctccacgcatacgcattgctgtaaatgcttcatgtcccggagtatcaaggaatgtgatcttctctccgttgatctcgacaacggatgcaccgatgtgctgtgtaataccgccggcctcacgtcctgttacattactgtcacggatcgcatccagaagagaagtcttaccatggtcaacgtgtcccataacgcagacaaccggaggacgtttcaccatcaggctttcatcttcctcatcctctttcaggagttcttcgattacatccacgacctcttccttctcacacagaacatcaaattccattgcgatctcttcagcagtatcgtaatcaatctcctgatttaccgtaacaacttttccctgcaggaacagcttctttacgatcacagacggaacaatcttcatcttgtcggcaagttctttgatcgtaagaacttctggaatcacgatctgcttgatctgctcttccttcttttcttccggcttattctgcggtttctttacttcgaccacatttttctgctttttgccttttttgcccttgccctcaaatgcctcgtctctgtattctttcttcttattatctctctctttatctttcgccttatttctctggctcttctgctgctcgacgattggagctgcgtctctgtccgcacggtcatttctgcggttatcatttcttctgtcaggacgagatccctgaccatttcttccatcacggttatcgcggcctccgaacccctgttcgcgtccgcctcttgcatcacggttgtcacgcggtcctctttcctgacgctgacctcttccgtctccattcggacgtccgcctctcgcatcacggctgtcacgaaccggacggttctctctgtcactgcctggacgctgtggtctgtcatttttctcctgacgtaccggtcttccctctccgctggtacgtcctgctgtctgagccggtctttctgtgcgtaccggtctctctgtccggtcagttctctcctgacgcgtacctgtctgagctgctctctctgtacgcactggttttccctctgcacctgctgcacgtaccggacggttctctcctccgcgtgcatttccctgtgctgtactgcgtccctgatttgctcccggacgcttatttccctgcagtctgctgctatttctggaattctgcggacgcactacaaatgcaagatttttcttctttggcactccgctgtccttttctgccgctttttctgctgccggttctgcctttgcaggttcttcatttctgccggcattttctcttctaatctcttctgccacgttatcctccactgtactcatatgattcttaacttcaacatttttctttttcaactgttccaggatctccttattccctactcccagctcttttgcaagttcatataccctcgctttcgccatatcaaacaacctccttcaggcaatcaagaacactcttttaatgctttcaaaattccttttgcaaatccttcgtccaatattgccagggatgcacggaactgctttcccattgcatgccccagggtatctttatcgctgtagaaaataatgggaacatcataaaattcacacatatcccgaaacttctttttcgtattctctgatgcatcctctgccacaactacaagcccggctcttcctgacttcgtttcactctctgtcaggaactcaccacttgcacagcgtcctgcttttgtcgcaaggctgatcagcgaaagtactttatctctggccaatccgctccatctcctttgcaagtttttcataaacttcctgtggaatttcctgcttaaaggaacgctccagtccatgactcttcactgacaggtcaaagcatgctttacacggacaaaggtaagcacctcttccgttcttcttcccggtcacatcaaccaggaattcttcttccgttctgagaatcctgatcaattcttttttcggtttcatttctccgcagcccacgcatttacgcatgggaatctttttattcactgccaaatgcttcactcctctgagtcttattctccgtctgtctccacaaactcaatttcatcgctgtctgtctcgtccgcagcagcctctgtattctcttcttcctcatcatattcaccgactgtatagccttcttcaccgaccatacccatctgctccatataattttccggaagttcgccactttcgattgcctgcgtctcactcttgatatcaatcttgtaacctgtcaggcgtgctgccagtcttgcattctgaccttcttttccgattgccagtgacaactgataatccggtacgatcacactcgctaccttcgcatccgggtcggccataacagaaattacttttgccggactcaatgcattctcgatcagaagtgccggattttcatcccagttaataatatcaatcttttcaccacgcagttcctgtactactgcattgactctcgcaccgttcattcccacgcatgctccgaccggatctacatttggatcattggaccatactgccatctttgtacgggaacctgcctcacgggcaatactcttgatttctaccgttccgtccttgacctcggctacttctgcctcaaacagacgctttacaagctccggatgtgtacgggatacaagaatctttggtccttttgtcgtattctttacttctacaatataaagcttgatacgctctgtcggctcaaaatgctctcccttaacctgctcattctctgtcagcatcgcatctgctcttccgaggttgatactgatattttttccaacataacgctgtacaataccggttacaatatctttctctttctcaaaatactgatcaaagacaacttttctctcttcttctctgatcttctgaaggatcaggttttttgcattctgcgttgcaatacgaccgaattcttttgaataaaccggaacctgggcgatatcaccgatgtgcagggacggattgatcttttctgcatcctccaggctgatctcgattgccggatcaaaaacttcttccacaacttctttttctgcaaatacggaatagtcacaggtctctctgtccatcacgatcttaatattatcggatgtcccgaaatggttcttacaggcactgagcagagaattttcgattgcttccatcatgacatctttgctgatgttcttttctttctcaagaatcgtcagtgcttcaagtaattctgtattcattattttttcctcctaaattaaaaatccaaagcaaggcggatcagagcgatgtctcctctgtcaaatgtctgctctgtatcatcttcataagtgattgtcaccgtactgtcatcatatgctttcagtaatcctacaaattctttctgacggtcaatcgcacgatacgtgcggatctccacttcttctccaagactccgtttaaaatctttctcttttttcagaggtcttccaagtcccggagaactcacttcaaatacataggagtctgcaatgtaatccttctcgtcaaggatatctgaaaatctcctgctcactgcttcacagtcatcgacagcaatgccgccgggtttgtcaatgtacgctcttaaataccacgtaccaccttcttttacatactccacatccacaagctcaaatcccagttctgttacgattggctcaagaagtgtctctgtctgctgctcatattcttctcttctggacacactaaactccctttctttaaaatgatatgatgtcgggggcaaaagccccccgactttgatgcctacggattgctccgtgctacgcactccacaatcctggcatcatgatattttacataaagaaatccttatatcatcaaagaagagtgaactttcgtccactcttctgccgttccctttatgtatcttttttaaccttatcaccttttttttgataaatcaagggttttcttttatttttttccgattttacttattttttccatttttaacgggttttattcccaacaccatctcttttcgcagctttcagacgattcagagtcaccgtcttttctccataggttactttcgtctctgttccttcttcaaaaagataagtatgctccagctcatcctttttctgcagacggattcctcttactccgactgccgccttctttttctccggtacatctgctgccgggaatcttaagaaatatccatttcttgtctgcaatactatattctgagtttcgttcaccacttttacagaaaccagccggtcatcttcctgaagtttcgttgccacgatcgtacgctttgcaacctgaaattcttttccatccacccgcttgatcattccctgtgctgtggcaaagaggagttttgcaaaccgcatctgttctgcatcacagatcatcacgatttcttcctcactgcttgtataattgctcacattatcaatcggagtccctttttcacggaattttccataaggaagatccagtaccttcacctggtgcatctttccggcatccgtaaagatgcagagctttccggtattcatacaatgtacaatgtatttattttcagaatccgcagcctctttatttctctcatatactgccgtatcaacagtcttcgcataaccaaaccgatccatcaggaacacgacttcctgttcttccaccttcttttcctcaaagacggcttcttccgcattttcgacaacagtgcggcgttttcttccaaattctttcttataagaatccagttctgccatgatgacttctgccatggaatcatagttgttcaggatatcttcatatcttgcaatatttttcagtgtctgctcatgctccttctgaagtgcctcgatctccagtccgatcagacgataaagacgcatctcaaggattgcagtagcctgacgctctgtaaaccgcagcattgctgccattttctttgaaatggaagatttaaaccggatattctccgtctttccttcaaccagacaggctcttgcatccttcaccgatttacttccccggagaatctcgatgatcaggtcgatcacatcgcatgccttgatcagtccttcctgaacttcactcttctcccgttctctttccagaagtgtcgtatactttctcgttgcaagttcaaactggaaatccacatgatgctcaatgatctgctttaaccccagcgtctccgggcggccgttcgcaactgcaagcatattaactccgaacgtatcttccagcctcgtctttttatagagcatatttttcaggttttctacatctgctccacgcttcagttcaatgacgatacggattccctctttggatgactgattggaaatatctacaatatctgttgtcttttttgtctctaccagattgcagacatcattcagaaattttccgattcctgccccgatcatcgtatacgggatctccgttatgacaagctgctttttcccgcctttcaaatcctctacttccactttaccacggagcttgatctttccctgccctgtctcataaatattcaacagatcatctttattgaccacgatccccccggtcgggaaatccggtcctttaatatatttcatgagctgtctggtcgtgaccccgtcatttttcatataagctttgacaccatcgatcacttcacagagattgtgcgtcgggatactcgttgccataccaaccgcaattccttctgctccatttacaaggagattcggtacacgcattgggagaaccaccggctctttttctgtctcatcaaagtttggtccaaaatcaatcacatttttatccagatctgaaagacatacttcctgtgtaaattttgtcagccttgcttccgtatatcgcattgctgccgcaccgtctccctcgatcgagccaaaatttccatgtccgtctacaaggatctgaccttttttaaaatcctgtgccatgactacaagtgcatcatagatcgaactgtctccatgcggatggtatttacccatggtatctccgacaatacgggcacacttccggtaaggcttatcataacggatccccagctcatacatatcatacagagtccttctctgcaccggcttcagtccatccctgacatcaggaagtgccctggcgatgataacactcatcgcatagtcgatataagattttttcatcagttccgaatattcggttctgataatctgagattcactgttcattttcattctccttagatatcaagttctgcctccgttgcattctcataaataaatgcttttcgcggcgggacttctgttcccatcagcatctctgtaacgctggatgccattctcgcatcttcgatctccaccagcttcagaagacgcctctccggatcaagtgtcgtctcccacaactgctccgcatccatctcgccaagacctttgtaccgttgcagtgtgaaaggacctgtatggtttttcctgtatttttccagtgctttgtcatcatacagatattcctcttctcctttctttggcatggctttatagagtggcggcatggcaatatagacatgtccttcataaatcagttccggcatgaaacggtaaaataatgtcagaagcagggtcgagatatgggctccgtctacatccgcatctgccatgataatgatcttatcataccgcagcttactgatatcaaaatcatttccatatccttccgaaaagccgcatccgaacgcattgatcatagtcttgatctccgcatttgcaagtactttgtcaatgcttgctttctccacatttaagatcttaccacggatcgggaggattgcctgataatttctgtctctggcagtcttggcagatccacccgcggaatctccctcaacaataaagatctcgcactttttcggatctctgctctcgcagtttgcaagctttccgttactgtcaaaagaatacttctgctttgtcaaaagattcgtctttgcccgctcctcggttttacggatctttgcggctttctccgcactggaaagaaccgtcttcaatgtctcgatatttcggtcaaagaaccggacgatttcctctcctgtcacttttccgactgccttggctgcatccgggttgtccagcttcgtcttcgtctgaccttcaaatctcggatcgggatgcttgatcgatatgatcgcagtcattccattacggatatctgcaccggtaaaattcgcatctttttctttcagcactcccagctctcttgcatactggttcatcaccgtcgtaaaagtcgtcttaaatcccgtaagatgcgttcctccttctgcattataaatattgttacagaaaccgaccacattctcatgaaattcattgacatactgaagtgccacttctacctcaatcccgtctgcctctcccttaaaatagatcggctcatgcagtacctctttcttatggttcatatccgtaatgaatccgataatcccctccggctcatggtattcgatcttttcttctgatccctgccttttatcttcaaaaaaaattgtcagcttcggattcagataggcagtctcatgcagacggctcttgatctcttccgctttgaatctcgtcttttcaaaaatcgtatcatccggaaggaaattcaccgtcgtcccggtctttctcgtctttccgatcttcggcagcagtccgtcttccagttcaatgaccgggattcctctctcataccgatcatgatgaatatatccatcacggctgatctttacatccatgtaagcggaaagtgcatttacgactgaagatccgactccatgaagtcctccactggtcttatatgctgaatcatcaaattttccccctgcatgaagtgtcgtatagaccagacgtgctgcggaaatgcctttctgatgcatatccaccggaactcctcttccgttgtcagatacagttgcagaaccgtctttttccagcgtgacatggatttccgtacagaatcctgccagatgctcgtccactgcattgtccacgatctcataaaccaggtggttcagtccttttgtggacacgcttccgatatacattccgggacgcacacgtaccgcttccagaccttccagcactgcaatactgcctgcatcgtatgtagtctttcttgacatttcatcttctcctttgtcaaattttcagaataatccatttgatactataacacttcacaaagcgtatctgcaagcacttccattgcatttttcatttcctcaacagtattggtctgtgctccggcttcgatcagaagcgattttgggagaagatgcaggttgtagcgataggctttcagatagatatgccttacaaaacccggatacatcctttctgaggcaagctgcatctgcagagagaatgccagattatcctgtatgtacggattgtaaagatatgtgatatccccattggttcttgaacggctcaatccattgaaatacatgatcctggctgtcggctttccattgatctgcgtgacaagatgcgttgtctctgccactccgtcccgatgaaggtcaatggctacttcaatagaaggattcgcctccaggatcggacggatcgaagcttctgcattttcatatgcctcactccggtccagttttccgttaataatatcatagacaccaaaatcatggagtgtagggatccctttcgcattcagaagttccgtcagatattgtccgattcccacgatcccggttgaaatatctcccgggactgaatctacaaatgtttcctgggaatgggtatgaaagatcagaattttcggttcatttccctcccgaccgatcttcatatttcttccaagcagatcatccacattgagctgttccgccccgatcatcgtagaactgtctaccgtataaaaattgctcaaaaggtactcaaagtctctcagtttatcaatagactggtctgccgctacctcggatgagaccggctgctgcggctcatccggctgaccgatcagttttccattttcatcgactgcattttcgtcattcgcctgactttccaatatttttgcgatcgtctcctcatcttcaagagacgatccatactctgtatgatcttccacatactgaaccactggaatccacgccagtgctttttgtctgatccactcccccggtcccgatgaaaccgaatcttctttccatacaagagaaggcacatacatagcctgtgcagaccggagaagatactgttgaagctgatactgtaattgtgctgcattttttctgattccattcaggatcagaagcatactgcacaccgacagaaccagtactgcacctgtcttccccgactgccattttctgctttttatcttcttcattctctttgctctcccttcccgtcccacgattcttctgtagctttctgctatctttctattatatgagagcaaagaaggttcaatgcttctgcgatcgtatggctgatctgatggatcatctcatctacatcttttggtgtcacaaacattccattcagatgaggtgcaatcagctctttcaccagttcgtacttttccccctgattataagaacgcagtgtttctcctacacttttcaatgtttccgattcttccagggcatgaatgaaattttccatcgtatcatttacgatcgttgcagcatccacaactgttggcacaccgattccgatcaccggaactccaagagattcttttgtcattccatttctataattgcctacacctgatcccggatggatccctgtatctgcgatctggatcgtccggtttaatcgcctgctgttgcgtgccgccagtgcatctaccgcaatcacaagatccggtctggtttcccggacgatccctctgactatttcagttgtctccatcccggtctgccccatcacccccgggacaatggcactgaccagtttcgcatgttccactcccattgcatattttccatattccctgataatatgtctcgtcacgttcagatgatctgccacacagggacccagggcatccggcgttatattacggtttcccagtccgacgaccaggatagacagatcttcctcctcttttccctctttcgcttcaaaattttttctcaacagttcactgatacaatcacggatcttttctgagatccgcatctgctcctcttcatccggcactgcaagggccggactttccagtgtcagatacgtgcctgccggttttcccattgcctttgctccattttccgtttcaataatcacccgtgtgatcctggtctcactgctttcatcataatcctcttccagaatcactcccgaaatttccacctggtcagattcaaacctctccctctcttcaagtgcaagatctgtccttacgctgtaattttttgtcatcgttttttcctctccgttgcctgttatagttccataatattatttttcttttttatcaaaatatgtattgacaacgtctatttcatggaataaaatcccatctttgacagttggaaagataaaaatggctacaaacccagtaaacatgggctctgtagccgttttttatttcgtaacgatatgtgctatattatgatttttttgatttaatctgtttcgtttctttaatgattgttcgcatggaggcttttgtaatgaattcataatccgttctaaagccgaatgttttgtgcagagaatccgttaattctgttcttgtgtaggaaggaatataaccacttgctgtatttagtagtgtcatttgcatagaacgtaatgtcccaagtatctgactgaccgtataagcatctccaagtttcttttctaataaccgataaagaagaagactgatatagcaagtcatgaaatgagcttttattcgctcctctcttcgtacatagactggtctagcttcaaattcggttttcataattctaaagttttcttctatttcccaacgctgtttgttaatccgtatgatttcagagacatcaccttccagatttgtaataacagcataaaaaccatcatacatttcttctttttgaatctgttcttcatcgatattgtatacttgtttattagcgatttccccatctggcgtcacagaagtcttctttacaaaacgcattggatcattctgattttttccttttcgtttacgcccaggtgtgttgatgatcttttcagcatgttcgatttggcggtcacgaattcttctttggtatgctttatattttggagaataagtaacaatcagagtttcatccatgtttcctgtaaccacgggaacttctttgtaataaacagtgttataaacttcttcatcagtttcatcaagtgtacgcagatctatgaattttgtgctaccgactttacgaaactgcgtagggttcagagcaatctcacgatcttctttcttcatctttttaagagaatgagtgatgatgtatgcccggtttccaagactgttaaatcttctgttcgcagcacttccaagtccggaatcagaacaatagatgaattcactgcagttaaagtcctggagaatttttgattctaaaggctttaaagttgtctgttcattttgatttcctggataaacatcaaaagcaagaggaataccatcagcatccataaataatcccatagttacaattggattcggacggttttccttacttttaccataacgcttagaatcgctttcctcttcaatttcgaaatagtagtttgtgcaatcgtaatagaggatacgattatttcttggataaaggaaattagaattcttgtaaagttcactttgaataaaatccgattcttctgcaatcacagaaagagagcggtaaacatcctgcagactgtatttaggtggctctaacagtgtttgacaatagtcatagctagccagcttgctagaaggcgataggattcgtgcataaactaaatcagtcaggattgcttgtagattatatttatatttgtggcgttctttgattgttctacaaatcttatctatacgaagttgtgtacaaagttcttgtaaaaagagatacccaacattgaaagaacggcgttcattcatcggaatgcaagcagcttttgaaaactctacagaaatctttccagtagcttctttatagagctnttgcttgtagattatatttatatttgtggcgttctttgattgttctacaaatcttatctatacgaagttgtgtacaaagttcttgtaaaaagagatacccaacattgaaagaacggcgttcattcatcggaatgcaagcagcttttgaaaactctacagaaatctttccagtagcttctttatagagctttgtttctttatcagcctgctctcttgcccatgccatcatcttatctctgtcaccatcgaattgttctaaaagtgtgttatattttccaagttttttataaatacgagatgaggacttaccattttccttgcgaaaagaatgataaatatacacatctttattgttttcactacctgtaagtgcaatatacatgattagaaaaaactccttttcttttattataacacactattacaaacaagtacatataaaaacggaaaatttgacataaaaaaagcaggttttataaggcctgcaaggtatttttctaatattcaactgtcaaactcccgntttattgttttcactacctgtaagtgcaatatacatgattagaaaaaactccttttcttttattataacacactattacaaacaagtacatataaaaacggaaaatttgacataaaaaaagcaggttttataaggcctgcaaggtatttttctaatattcaactgtcaaactcccgcgtcgaagtactgaccaaataataaaaacctggcaggaactcgctctgcgtattttctgtgttttaatatctttatcgcatcatcttaacatttactaaattttttaaaaattttacttactttatggtaaattatcacaaaaaatagtataatngcgtcgaagtactgaccaaataataaaaacctggcaggaactcgctctgcgtattttctgtgttttaatatctttatcgcatcatcttaacatttactaaattttttaaaaattttacttactttatggtaaattatcacaaaaaatagtataatgaaatggaagtattatgaaagagagggctttatatgaaacaagataacatgttggctatgattttagcaggaggacgtggtacaagacttcacgacctgacaaaaaaagtggccaaaccggccgtttcatatggtggaaaatatcgtattattgactttccgctcagcaactgtgcaaatagtggtattgacattgtcggtgtcctcactcagtatgaatctgttctcctcaacagctatgctgctgcaggaagaagatggggactcgatgcaaaggatagtggagtttacatacttcctcctcgtgagaaagcagatacaggacttgatgtatacagaggaactgccgatgcgatctcccagaatatcgactttatcgattcttattctccggagtatctcctgattctttccggagatcatatttacaaaatgaattacgataaaatgcttgagtaccacaaagcaaatcatgctgatgcaacgattgcagtcattgaagtaccaatgaaagaagccagccgttttggcattatgaatacaaatgagacaggccgtatcgtagaatttgaagaaaaacctgagaaaccaaagagtaaccttgcatccatgggtatttatatctttaactggaagcttcttcgcaagatgcttcttgctgatatgaagaatcctgaatccagtcatgatttcggtaaggatattatcccgaccatgctcgcagatgaaaagacgcttttcgcctataaattcaaaggctactggaaagatgtaggaaccatcgactccctctgggaggcaaatatggatcttctgaacaagaataatgcactggatctgaacgattcttcctggaaaatctatacagaagatgtcactgctcttccacagtttatcggtgctgatgctgatattgacagagctttcatcacacagggatgtgtcatcaacggaactgttaagaactcagttctctttacaggtgcaaaagttgctgccggtgcaaaagtcattgacagcgtcctgatgccgggtgttgaagtagctgaaggtgcagtcgtaacccgtgcacttgttgccgataaggtaaagatcggaaagaatgccgtagtcggcagtgcagacagtgagaatatcgaactggttgcaaaacgtgtaaagggggaagagtaagatgagtaaagcatttggaattattaatttcgcaggaaatgacgtacaggtaaatggtatgctggattatcgtccgatcggagctttttctttcctcggaagataccgcgtgatcgactttcctatttctaatatgagtaacagtgggattgatgtaatgcaggtttacgtccgcagaaaacctcgttccctcgtagaacatctcggaacaggacgtcattacaacatcaactccaagcgtggaaagctgaacattctttttgcagagaccattgaagagaacaatgtctacaatacagatattgccgcttacatcgagaactttgactgctttgatgagattgattccgaatatgtagtccttgcaccaagttatatgatctatacagcagattatagtacattccttcagtctcatattgaatcaggtgcagatatcacactgatgtaccacagcgtagataatgcaaaggatcatttcctgaattgccatgcactggatatcaacaagcagaagggagttctttccattgagccgaaccatggaaatacaaagagcaaaaatatcttcatggatacttatgtaatgaagaaagctctgttccttgaactggttcagaaggctcataagctttcttccatgtatacacttgctgatatcgtacgtgaagaatgtgaagaactggatgttcgtgcttattctcaccgtggattctttgctacgatcactgacttcaacagttattatgaggcaaatatggaactgatcaacctcaagaaagcaacagatcttttcgatgagaactggccgatctacacccgtacaaatgattcctgcccgacgcagtactttgatggaagtgaagtgaaatcttccgttatttccaacggctgcctgatcgagggtacgattgaaaattctgttatcggacgtggctgtatcatcaaagaaggagcagttgttaagaattgtgtcatcaatgccgatgtagtcatcggaaagggtgtccatgttgaaaatctcgtaatagacaagcatgcccgcctgatccgtggaaagcgtgtcatcgcaacaccggaaaaaccgggatatatcaagcgtggcgaccgcctgtagggcaactttgatccattgatcatttataaagattattttgtcagcaagacttttgtctttacataataaaccttccaaagaaacccgctgcttcatggaacttccatcgcagcgggtttctcataatttatctcttttcttctctactcttttgaactttccggttctttctgtaaataaccgccagtcctttcaacaacagatcatcatccaaaataatctctctcttacaatgcggcacaatcttcttcgcaagtccgcctgtcgcaatcacggtggcctccccttccagctcatcctgcagtctgtcaataattccatcgatcgctgcggcactgctgtagataattccactcttcatgcattctaccgtattctttcctatgatatgctccggtgcttcaatcccaatccctccaagctgggatgcacgagccgtcagtgaatccagtgacactccgattcccggatagatcattcctccgatataatttttatttttgtcaatcacactgactgtattggctgttccaagatccaggatcagaagcggtacaggatattctgcgatcccggctactgcattcacaaccagatcacttccaagctgtgccggattgtccatacggatattgagtcccgtcttaatccctgctcctactaccagcacttctttcttgaggatcttttcaactgcaagctttacaatattcgtgatctgcggaacaaccgaggaaacgatcccgccctctatatcacttctgtgaatatgatagatatccaatacatttttaatatcaatcgcatattccagttcggtcttcgtacgcactgtggacagacgttccacgaataaacattcatccccgtcgatacatcccagtacaatatttgtatttcctacatcaatcgctaatatcatttttctcctgcccctctctgaaactcaggatacggtcaatgatctctgctgctgtatcctcttttgacatcttgccgagctgctcatcccgatccttcgtgataatcgttacaatgttcgtatcaccaccgaatccggcaccttccaccttcaggctgttcgcaacgatcatatccaggttctttttctgcaatttcccacgggaattttcaagcatatgctccgtctccatggaaaatccgcagaggaactgttcttctttcttatgcattccaagataagctaaaatatcgtccgtacgctccagctccagtgacagatcgtctcccttcttctttactttttcatcactgatatatttcggacggtaatctgccacagccgccgcttttatgatgatatcctgttcagcagcccgtcctgtcacttcatcgaacatctccttcgctgtcgtaaccggcacaaccttcacaaactccggcttcttcagtgctgacggtcctgtgacaagcgtaacctctgcacctctctgcatgcagacccgtgcgatcgcatatcccatccgtcccgtagaatgattcgtgatataacgaaccggatctaccgcctcctgcgtcggtcctgcggtcacaagaactttcagtcctctcatgtccttttcccgtgccacttcctttaaaatatactctaaaagaagctccggctcaggcatctttcctgaccctgtatctccacacgcaagatagccgactgccggtgagattacttcataaccataatattccagttttttcagattatcctgcacgatgggattctcgaacatattcgtattcattgccggtgcaatgatctttctgcatctgcatgccatcaccgttgttgtcagcatatcatccgcaattccaccggcaatcttcccgatcacattcgcacttgcaggtgcgagcatgacaacatctgcctttttcgccaacgatacatgctccacactatattgaaaattccggtcaaacgtatcaaccagacatttatttcccgtcagcgtctcaaacgtgatcggattgataaagttcgtggcattctgcgtcatcagcacatgcacatctgcgtccagcttctttaatgcactggcaagcgatgcgatcttgtatgctgcaatacttcccgatacgcctaacagaactgtcttccccttcagcatcgagttttcctccttttgtccgcctcttccaatatttacgctttattatagggcattgaatatgaaaaatcaacggctgtgtataaaactcccttcccagggaatgctgttactgttcctgaattttctgctggtgaagatctctttctgtcgcagatccagaatcagaaacagcagtcaatatcagtaaatcaacaaatcacaggaggtttttatccatggacgaacagacccgtaaacttttagaagagtgtacatcaggatgcaaaatggctgtcagcagtattcagcagatccttgaatttactcaggactcagcactccagaaaatattgaacaaatacatcgaacagcatacacacctgcagcagacagcagaaagccagttgtcagcagacggttttgagccaaaagatccgggaatgcttgcttcagcattttcctggtttacaacagaaatcaagctgggcatgaactctgataattctgagattgccaaggttctgatcgatggatgcagtatggggatcaaaaccctgggcgagcgtgccaatacactctgccaggcagataaaagtgctgattccattgcccgcaggatcataaaacttgaagaagaaatgatccgtgaactggagccgtttttataacttgtccaatcctcgcctttctgatataatataatttggaggattttatattatgatatgcaaatgacgaatcgttttttgttatatctgactaaggaaagagaggaaaaagtatgaaaaatgcaaaatttgcaggtgtccaacggcttctgtctgctgtatttgctgctacggtagcacttacttctgtgcagatcccggtctacgcgacacctcagacgcaggcggcagaacagaccagccaactggtcaatattgccggtgactgcgaaattactgtccccagttcccagagtggctatggtgcggaacgtatgactgacggagacagcagcacaatgtggattcagaacgatggaacatggccgagtaccgtgtccttaaaattacccgccgataatacaaagcggatcaaaaaagtcgtattaaaatttgaatccggtcagagtgcgtggggagttgacgtaacgctttctcatgcactgaacaacgttaccagtgacctggttatagataatactgccacggtcacatctttcgatgacggttatgaatttacttatgatactgccttaagttttacgcataccttcattgaactgtcaaatccgactaacaatggtgctgccggaggattctggccggcacttgcagaggtggagatctgggctgaaaatgaaagtggtgaggagtctcttaccaatgtagcccctgctgcaacgatcacctcggttggcggagattacggcacaaaaagcaacctcacagatgaggactatagttctctctatgtatttaatggtggtggaatgtccactctgccagacggtgcatggatcgaaatggaactggatcgggaatatcctgtcaaatccatggaggctgcttttgagcatctgtcttctgacgaaaacaatttccagtttaccttcgatatctatgggaagagttcaactgacacggaatggcagacactctttgccggagtgaatgcaacccgtctggatgacggctatcttcagacactgacactggattccatcaaaaatctcaaatcggtccgcatcgtcatcaccagcattaccaatacagcaggtgatccatggccggcacttgcggaatttaaaattttcgctgatacaagcggttccggttcagaggatacggaaagtatcgcctataaaaagccggttcatacaaatgccggaggagttgtctcccgtatcaatgatggttctaccatcaatacatggacgggtgaacgttatccggcttatgtagatattgatctggaggccaattataagctggatgagattcaggtttatactccttctgccggttattcccagtattctgtctatactagtatggatggacgggattttgagaagttagccgaaaagtctgacaaagaaaactgccctgctaagggggaatcttatcaagcaaataaaaaagaagcacgaatcgtacgtgtctatgtggaatatcagtctgaatcctccaaagcactgatcaacgagatccgtgtgcttggaactccaagtggtacagctgttcaggagactcctgcagtacaggttgaagattttaaaaactctgcatacaacgtaactgttaccgatcaggatacgatcaatgaagtaaagggaattattgaaagaagaatcggtgcagcttataaagactggtttacatttgaacttgcagatgctgcaaatggatatgactattatgacctttcccagagcaacggaaagatccatatcaagggaaataacggtgtatctcttgcaaccggtctgaattattacctgaaatattactgtaacgtcaatatttcccaggtcggcgatcaggtcaccatgccgaaaagcattattccggttgaaggaacggtacataaagaaaccaaattcccggttcgttattcttataactactgtaccctctcctactctatggctttctggggcgaagaggaatggagaaatgagttagactggcttgcactgaatggtgtaaatgtagttcttgatgccacagctcaggaagaagtctggagacgtttccttacagaacttggttatactcatcaggaagccaaagatttcattgccggacctgcctactatgcatgggcctatatggcaaatctttccggttatggcggcccggttcatgatacctggttcactgagagaacggagctcgcaagaaaaaatcagcttatcatgagaaagctcggcatgcagcctgtccttcagggatatagcggaatggtgccggtagatattacttccaaagatccttcggcagaagtgatcaagcagggaacctggtgttctttccagcggccaagtatgctgaggacagacagtgagtctttcacaaaatatgcagcactcttctataaagtacagaaagaagtttatggagattccgctcattattatgcaacagacccgttccatgaaggtggaaataccggtggtatggattccgctgttatttcgcagaaagtccttgcaagcatgatgactgctgatcctcacgcaacctgggtgatccagtcctggcagggaaatccgacaacggctctgcttcagggattaggtgacaaccgcaatcatgctcttgttctggatctctatgcggaaaagacacctcactggaatgagaccaaccctggttactacggtggtgcagaaggcggcggagaatttctgaatactccgtgggtttactgtatgctgaacaacttcggtggacgtctcggactccatggacatattgataattatgttgaaggaatcgtaaatgcctctaagcaggctgaacatatggcaggaatcggtatcacaccggaggcatctgtaaacaatccggttctctacgatcttttctttgaaacgatctgggctgatgacggaaataacttacagaagatcaatcttgatgaatggtttaaaaattatgtaacaagacgttacggtgcagacagtgactccgcttatcaggcaatggaaatactgcacgacaccgtatacaatcctgcatacaatatgaaaggacagggtgctcctgagtctgttgtaaatgccagaccgggactggatatcggtgcagcttctacatggggaaatgctgttgttgattatgataagaaaaaactggaaaaagcagccgagctgctccttgcagactatgataagctgaagaacagtgccggctatcaatatgaccttgccaatgtactggaacaggtattgtccaatacggctcaggaatatcagaaaaagatggcggcagctttccgctctggtgatgcggaagaatttagtaccctttccgataaattcctttctattattgatatggtagaaaaagtaaccggaacacagaaagaatttcttgtcggtacatggatcaacggtgcaaagaaactggcagaaaattccgatgattttacaaaagaactttacgaactgaatgcccgcagtctgatcaccacatggggaagttacgaccaggcaatcagcggtggactgatcgattattccaaccgtcagtgggccggtctgaccaacgattactataaaatgcgttgggagaaatggatcactgaacgtaaaaaagaacttgccggagaatcttataccaattactctgctcaggactggtttgagatggaatgggcatgggcaagaggtacaaataaatattccggtactccgaatggtcttgatcttcagggactcggaaccgatgtccttgctaactactcactcaccaatatgccgaaagatcctgccgaggatgattccagagatcttccgcttgaaggcatgactgctacagcaggaagtgaacaggcaacgaccggaagtgaaggaccggcatccgctgtactggatcagactacaggtacgatctggcacagcaaatggagcggtgatgctcgtgaaaatctctggatcgatatcgctcttggagagagtaagacggtaaccggactgcgtatgcttccaagatccggtggtgggaatggaactatcacttcctaccgcatcgagatcagtaatgatcacggcaagacttatcaggaagttgccacgggtacatggaacagcagtgacagttggaagatggcagagttccatgccatccaggctaccaatgtacgcctctatgcggtagaatctgtatcagacaccagcaatatttttgcatcagcagccgagattcgtatcatgggaccagctactgcaatcgttccggcagaggaaactatagtaaatatcgcaactccttctaaagaagcagatctgtcatctgcacaggctgcaaaggagactgataaatacaccgtctctacagtctggaaagatgcaaccggaacaacagtaacggctatatcaaaggataagaatgcgactcatgactatacggcgaagattactctcacccctgtcacaggatattcctttgacaaaaccagtgtaccggatacattgacattgaaactcaacgatcaaagaaccgttgaagctattccggtcacagacagtgttctcaatgatgatggaactgtcacaattacttaccagttcagcaatatgttccagggaggctcattacgaatggatcagtcttctcctgaaaaatctacgaacatgagatttggatatgactttaagttaccggaagcttcatccgaaaaagatgagattagctttaaaggctgtacctggtattatggagtagctgaggatgacttaaagaataccttctctccagacaaaacaaactttataacgaatcctgataaaaaaggagctgaatactacagatccaatatcgtattcacaaatctttcatccggtgcttataaacgctctgtatatgccagaatcctggtaaaatatacagtaaatggaaaagaacgcagtgtgatgggaacatttgtagattcaagatccgtcagcatgatcgttgaaggaatccttgccaatacgaacgcagatcagacggaaaaagattatgcacagaaaatcaaagatgcaattttaaagtaatcatttttcttcaatcattaaaacaggtgaagccgacgcatttgcgtcggctttatctgaccttatatcttttttcagaattgaccatttttaacggttcacatttgttgtatagtagagagagtttgaaaggaaagaggtttaactatgaatacaacaacaaattcaaaactgaaaaagatcgttcttaccgcattgttcgcagcactttcctgtgttgcaactatgtcgatcaagcttcctacaccgggaaccggcggatatattcatccgggtgatgcaatggtaatcctctcaggtgtcgttctcggaccatggtggggacttcttgcaggcggaattggttctgcaatggcagatctccttggcggatatttcgtgtatgttccgatcacttttgcgatcaaaggactggtagctgtctgtgccggactcttatatcagaagatcggtcatacttccaagtcacgttatgccgctgtcattctcggcggtatagctgatatcatcctcgtagccggtggctactgcttctgcgaatactttttcctgtatggttcaggtgcattcgcaagcgtacctgccaacctgatccagggactcggcggactcatcatttcagcagtcctttatccgatccttatggctgtcccggatgtaagacagactgccaatgcggtaaatgaataaggaaacgaacaagacttaaaattcctgacagcaaaaagaaccagtcatttgcataagcaaatagctggttcttttttatatgctcatttcactccgtccaccgtttcgtttatctcaacatcagtgtatcgatcggtttcaatacgattgctgaatatgctcccatattcagtacaatctcgccatcctctacaatatactcatcataagccgttgtatatccatactcataagtatagatcagacgcttcatacgcccgctcatctccattcctgtcagccagacaggtactgtgacttctttcaggatactgctgttattcacaataataaccaactgctcatccttttcaaaccgtccatatgccagcagattctgccctgcggcaagcagcttgatcgagccttttctgagcggtttttccgtcttatggatacggatcatctctttatgaaatgcaagcagctcctgatcttcgcgtccccacggataagtccttctgttatccggatcagtaaaaccacacagtcctgcttcatctccgtaataaaccgtcggtgcacctacccacgtcatctgtatcacaactgcttcacgcatgatcgcaggatttacaccctcctctgctccttttgtgccatgctggcttacccgtccgaccttatggttcgtcctcgtaaggaaccgggaatgatcgtggttggataattcattcattgccacctgcaaagacggggtcagcatacttgccataaaatgtctcattgctccgataaaattatctgcattgccccacagatccgttctacgctcatcactgtgtttctccataccggtcaaaaaccaggtcaccggctccataaatgcatcataattcatcacactgtcccactcgtctccctgaagccagtcctgtggatctccgtaatgctctgcaagaatcagtgcatccgggttcacacttttgacctctttgcggaaacgtttccagaataaatgattatattcattgctgaatccgagatccgctgcgacatccagtctccagccgtcaatattataaggtgcagacacccatttttttccgatccgcataatgtaatcttccagagccggtgactcctcatatgccagcttcggcagtgtatcatgtccccaccagccatcatatgtcccattgtacggccatgctgaatcctgattattatggaacaggaaaaagctgcggtacggactgtccgcactcacgtaagccccctttgggtaatccggctgcggttcataaatccgctctctgtccatccatttattgaatgaaccgcaatgattaaatacaccatccaggatcactttcattccccgctgatgcatcgcatcgaccagctttgcaaaaagctggttactggcctccagattccgcaggtcaccggttctctgctgatactttgttgcctggagattgtcctttgctcccttcggaagcacctctccgtcatccactacgatctttccgtaatgagggtcaatatagtcatagtcctgtatatcatacttatggttcgatggagacacgaacagtggattaaaataaatcacctcaattccaagctcctgcagatagtccagcttatccatgactccctgcaggtctccgccataaaaattcctgatatccatggatgccggagcctgactccattccttaatttttttacatggagctccgatataaatatattcaccatcttctacgtcatttgtcggatctccgttatagaagcggtctacaaaaatctgatacatgactgccccttttgcccattccggtgtggaaaatccaggctggataataaaagaatagtactcttccgcccggtaggtcacaccataccggctgaaatagcagatttcagttcctttcttaatctcaaaataatagtggaacgactcagttcccaactgatattcgatctcataaaaatcaaattcccccgttgtctgcattttccataaggtatacgtctgttctcctgcatgcagcttcacctcatccacatcattgtgggctgtccgaaaacgcaaaaccaccttttcatttatctccggttctgccggaatgacataatcgcctgttccatcacaaaataatgcttctctgttcattctcaccctcctcttacgatccttcgtattctggatccataaatgtcagaaaacccccggccgtcagttccttctggcgacagagggtatacagtaaacctttttcaggcatccgtctcactttcctcaaacagtgcttcgaattcgcttctggttatcttctctttctcaagcaacagttctgcacacttttccaatacaggatggtattcctgaataatacttcttgcctgtgcataacactcatctatgatcctcttgacttcttcgtcaatcgttccggcaactttttctccgtaacctcttgaagtatgaccaaaatctcttccgataaagacttcatcactgtcattgtcataattgatcagtcccagtctctcagacataccaaacttggtgatcattgatttcgcaatcgctgtcgcctgcttgatatcctgtgatgcacctgtggtaatatcatcaaaaatctcttcttctgcgacacgtcctccaagagatactgtgatctcctgaatcatatgtccctttgtattgaacatatcatctttttccggaagcggcattgtatatccgcctgctccacccgttggaatgatggatacgctgtataccggtcctacatccggcagcacatggaacaggatcgcatgccctgcttcatgatacgctgtgatccttcgctccttctctgaaacgatccggcttttcttctccggtccgatccccacttttacaaatgcatgacgaatatcggactgctggataaatacccggttctccttcgctgcaaggattgcagcttcattaagaaggttctcaagatctgctcctgaaaatcctgccgttgtctgtgcgatctgcttcagatccacatcatcgccaagcggcttatttcttgcgtgtactttcaggatctcctctcttccgcccacatccggtctgccgacaatgacatcccggtcaaatctgcccggacgtaagatcgccggatcaagaatatccttccggttcgttgccgccatcacgataattccttcatttacaccaaatccatccatctctacaaggagctggttcaatgtctgctctctctcgtcatgaccaccgccaagaccgctgccgcgccgtcttgcgaccgcatcgatctcatcaataaacacgatacagggagcattcttcttcgcatcctgaaacagatccctgacacgggatgcaccgactccgacaaacatctccacgaaatcagaacccgaaatgctaaagaacggaactcctgcttctcctgctactgcctttgcaagcagcgtcttaccggttcccggaggtccctccagcaggactcccttcgggattcttgctccaagctgagtatattttctcggtgctttcaggaaatcaacgatctcctcaagctcctctttctcttctttcagacctgcaacatctgcaaatgttaccttgatctcattctgcgtactcattctggcacggctctttccaaaattcatcgcttttgaatttgttccgccattctgacggttcatcagcataaacagtaaaaagataccgcataaagtaatcagtgacgggagaactgctgacaggatgatggactctttcggaacatcctcaagactgtacttcacatcatttttctgcaaaagttcttccactttacctacatccgaaacattcaggcttcttacagacgaatcctccttcaatgacaacgtcacccgtccggtcggcacagcactgttctgtctgatatctgccgccgtgacattccccgcttctacttcttttacaaaagtagagtaggaaatttcctgctggtgcatctgcaccttgttcgccatccacaggatgcctcctatgataaggatgaacagcaggatcgagccccagttcacacctctgtattttttcttgttctccaaggcttataactcctccttattctacaccttccacaactccgatatacggaaggtttctatatttctgtgcgtagtccagtccatatccgactacaaattcatccgggatctcaaatcccgtataatccacctttacatccttcacacgacgatccggtttgtccagaagcgtgcaaagatgaaggcttgcaggctttcttctctgaagtacatccatcagataatacagcgtatttcctgaatcaatgatatcttccacgatcagcacgtcttttccctcgatggactcatccagatcctttgcaatacgcactacaccgctggactttgttccgtctccgtagcttcccacgcacataaagtccatggaaaccggtaccgtaatcctctttgccagttcacacatgaaaaagactccgcccttcagtacacagatcagatgaatctgctttccctcataatctttgctgatctgctctcctaatgctctaattcttgcgtcaacttcttcttctggaactaatacttttatactctctgccatgatcctattcctccactatctttatcttaagaatcttcgttgtctgatccccaatctgatatgccgcactcatccgcatacccgggatccatacgatctgttcttcttccgcgatcagaagtatccggtcccttttttcctttgggactttctcattaataaaataagacttcagcttctgccgctttccccggctgtcaatcaccagctcatcaccgggtcttctgtatcttatacagagtccgcttttgattatatcataatcaaagcatttcgtgtagcttttttgtggcaactctttccctgaaactgcttcttctcttccacagatctcacaacagactttctgccccgttcccgggaaataagtttcccccggaatcttcagttccacgctctgctgcccggcaccttctttttcctgagcctttttctgattctttttctgatccctatcttcagatcttcgccggatctcaactccggcataggttctgaccgcccggagctgatacggaagatccctgctttttccgacctgcctgccaaataaccctcttactgcttccatatgcactgcttcaatatctttctgtgcttctgccatttcacagatacaccgacggatcagaagagactgtaaaacgcccggaagttctgcatattcttcctcttcaatcctgagtcctgccggcttttcttcctttttcccctgctgcttttcttccggattttcctccgaaacatccaccggatggaccatctgtctccatgccgcatccgcctgcaggttcagatactcccatatttcttctgcctgtaaactcagacgattgatatgctctactgtctgacggttgatctcctgttccataaccggaagaatcttgtgccggatccggttgcgggtatactcatcttcttcgttcgtctcatcagtacaataggaaatctgctcctcttccagccactcttcaatctctttcctcgtcagacagagcagcggacggatccggtttccgtaaaccggacgaatcccgcacattccctgaagcccgcttcccctcgccagattcagaagtactgtctctgcattatcatttttatgatgtgccgtcgcgatcttattcgcaccggactccctgcatacagtctcaaaagcattgctccgtacgatacggcctgcttcttcaagagattttttcccattttttgcaattaattccacattttcatgaaaaatcctgcagggaacatcaagttttctgcacagctctttcacataagcctcatcctgctctgccgcctctgctctcaactgatggttcacatggcagacgatcacctcaaacccaagctttttccgcagttcgcaaagcacaaaaagcaggcataccgaatctgctccacccgatacacctgtcacgatgcggtcaccccgcccgatcatctgatactgttcaatatactgctctactttttttctttttttatccatcatatgtaaactataccgaaatactttttaattgtaaatccctgctgtttaacttttcagactttcctgacacccattccataccggtcgccatcttgtctaacatctcagcctcttcctgtcacgctttccatatcccgactgcaaggactgtcatatcatcctccggttctcttcccgtccagctcagaacctgctgaagaatatgatgtgccaactccttcggattgctgatggcagtgcctttgatgatcgtctccaggagcagatcctgttctcccaccggcagtgcatccatcacaccatccgttaccataatgataaaatctccatcttccagttgccgacgcaccgaatcgatttctatagaattgatcactccgatcggaagactggtggaatttaaatgttccactccggctttgcttcggataaatgttgaagatgctcccgctttgatgatctcacattccccgttgtacaggtcaaagatcgtcatgtctaccgtcgagtaatggatttcctcacgccccatcaccagagttgtattaatcatctggattgcagtcttttccggaaatcccgcctccagaagttcttctaaaagctccaccaccagggtactctccctgcacgcggtttcacctgaacccatcccatcagaaagcaccacgcccttttttccacccggcagctccatcatggcaaaattatcgcctgaaatgctgttgcaccccttgccgatccgggcaactcccggaattgtataatataccggtccttccctgcagataacagtcatataattctgcccgatcatctgggcactgtcattttctgcgacaaaccgtcgtcctgttgcggctgatacgcaccgcaccagttcccggacagtcattctctttttctgcatcgctctcgcagtcacatgaacttcgtattttccttcccggttcatgaaaaactgcgtatacagaaccttgacgccacgctttttcagctgcccggagatccgccgctccatccgttcatccgtaaaaatactttcctccagttcccttgcactgctctgaagcatatccgcaaaagtatccagttggatcgcacatccctctctgcttcttgcgatccggttgatccagatcatgttctgtcttgcatcatgaaatccttccagcatttccctgagaaaccgcggtgccatgatgcaacgctgcatcagtttccgcttggtttctgtattcagatcattcccgtaatgatccaccgcagacaggacttcatatcccatctgataggtatggataaaattttctccccagcaccattcacatttctcacattttgagcagactttttctttcagacgacgaaacatcatctcgatctcctcatccgaaaaggcttgctttttttcttccagcccaagaaatatctgtgaaagctgctttacagaacccgcaaaacgttcgatctgttccacataggggctattatgcaatgtctgcccgtcgttcatatcctgtattccgctccttcctgtcagatgataaaagctccgggagaacttctctcccggagctatcttttgtatctctctatgtaactgactcttttatgcctgtctacttgatcggcttgaaaataatctcattcggatctgccaggtgcagcttatcctctgctgtctccctgatatactcatctgtctgaacatatgcctcatattctttaatctcttctgaacgggcctcctcagcctcaatctgtgcctgaagctctgcttcctgtgctttataggcattattcctgctccagagactgacagaacctgctgtaaccattccgcctaaaagtacgattaccagcgtcgtcaggacaatgcccctcttatgccagcgaagaccgctgttcttacggcttttctgccgtctgttccttacgttcttattctttgccatccaagattcaccctgcttataaatgatactccaaactgctacgctccctcagatccgaaaactgctttccccttcagattttcggacaacataattattttatctattttttttaaacttttcaaggctttttctcagatttgataacatttttttcaacaatattttcacacttttccaaaacaacattcccagcaggattccggctataaaataccatcggatactgccataagtcgtcacataaagctgatggaaaaggtagatactgactgcgacagaataaagaatatcttccactccgaccaggaaatcgtgatgccggatgatccgcctgaaccaccgcaatacatcataaccggccagaacggtcagaccggaaagtcctgcatatagaaagatcattgcctctgctccaagtcccggcatctttccctcctaccggaacagccgggacaggaaattttctcctgctttctctgccggagtggaactggaataagcaatgctgtcgatatttcccgacagatcaacctctcccttttccacactgagccgatttacatgcagatccgttcccttgaccatcaacattccctgctctgtttccagaagaatctcattgaggtcaaaggaaagaacatccagaaccccggtcaccatactcgtcttccgattattcaccacaagcttatgtgctttggcgatcctctgctcttccatctgcgtacctccctttttagtccaacactctgcacatctgatatatatgacgggttgtacgcttttatgactgtaaattgagaagacagcttcagatcacagtacactttccggtcttcctgatcaatgaaaccggttaaatataacggaacagctcttttgcctcttctttcttcgttgtctcctgaagatcaagaacttccactttcaccgatctcgttccaaactggatctcaatgacatcccccggctttacctttacagatgcttttgcagtctttccgttcacaaggactcttcctgcatcacatgcttcatttgccacggttcttcttttaatcagcctagatacttttaaaaatttgtctaatctcatcttttttgattccttttagtgctttttcattgtataacttccattgcttgcccggaatgcattcatgatatacctcgccccacatacaaaggacagaacatatccgatcgtcagatctgtataataatcacctgcaagacctgtctgatccagaatctctcccagatactggtaactgtcaaaaaatgtgaatccctgatctttcaatgcatcatatgcatcccagctccatgcgatccggtttccaaaatagatcatcacaaccatgatcaccgaggaaatgaccactccctttttatcaagatggccgccaagcatctcatatcctttcatcgcacagattccgatcactgctcctgcgattcctgcaatatagcccagcttatagatcaggatccacagaatgcatccgatcagagaaccaagtaccgcacccacgatcccttctgccatgcggctcttctttgcctggacttcctgctggttctgctgcagattctgaccgatctgccctgcacaattttcacataccagatgatgcattccattgatctcataatctgaaactggtacattctctgacttgcagtactcgcatccgctggaatatcttcccatcgtcaggtactggatcaccggcatcaccgcctcattgatcgctgccggacactttgaaccaaatgcaggcatcttcacattcatcagaagtgctgtcggactgatcttcgcattcagaacaccttttaccttcgtcttatgttctgcaagaaaagcagccagcttctgattattcacatcgtcatcagaatgggcattcatacagatctgatagaatccattcatctggttcaccatgatctcatatcctctgtaacttccgcagaggcattttcccttatctgtcagttttccctctaagatctgcacccgtactttttccttaaacataacctttcccccttcgtatctcatataaaatgatgctgcgtcagttgccggtgtcctgtgcctgtatagccacaggctccggctcattgcccgcagaaacaaaaaacagacaggcactgcaaccatttccttgcaaaaacctgtctgatccgattcatttcatccgctctttctgcagaagattagttgattgcatcctttaatgctttaccggctttgaacttcggagctttacatgctgcgatcgtcattgtctcacctgtctgaggatttcttccctctcttgctgctctctcgcttacttcaaatgttccgaatccaacgagctgtactttatctcctgccttaagctgttcagcaactacatcaacaaaagccttcagtgctttttctgaatctttcttggaaatctctgctttctctgctactgctgcaataaattctgtcttgttcatggattatttcctccttcattgtacttaaatacaatttcatacttattttttcaaaggctccatgtccactcgtccgtccacatggatgcacccttatgtactgttataacggttcagtccttatttgtcaaggaatttccgtttattccacctttttcaaattacaggtgtatcccgaaaatagttttcagaaaattcgtcttttcttcttcctgattcaccgcaagttccagcttctccacacttttttcaggcagccatgccttattcgacctgcaataactgctggcagtcttccagaacttctcaggataggcaagctgaagccccagatactcccattctcccggctccagccggcgttgtctttcatacgcccggatgatcccaacccccagtttctgtttccaacgatatttttccattgcttttctcagaaaataatacagatcctgcacctggattccaatccgcatatgttcaaaattggtgatcgcagtatctcccggcaggatcagaatattatgataattataatctccatgcatcatccggttttccgcaacgtttttttcataaatctgcatacagcctgactgttccatcgctgcggtgatcgcacaggccttctcatacatcgcttcaaaatgcttcagatacaacgcttcaaactcattttttacgaccctttttctgataaacgaacggacttttttcatttcccggttatgccgcagcatttcatccagcggactgcgtgcagcaggcgggcagacctgaaactcctcttccgggaattgttgctgtggcacaggctctttctccttcttttctgatactgctccatttcccgataccgctgcattttctgacactgctccactttccgataccgctgcattttctgacactgctccactttccgataccgctgcattttctgacactgctccactttccgataccgctgcattttctgatcgcactgcatacttgcaacgcagcgtttccagctcccctgctgtcggttcctgccatttcagatgcgtatgcagaatcccgagtttctcagcggcaagcaggagttcctgttcctttttcatatcacattcccgcccggagtaccactttttcatcatataacgagtcccgtccctggcagcaacgatcagctttccatcccttgaaaaaaccggtgcatctacttttaattttcccgtcttctcaagccggttcaatgtcagataaagcaatgccgctcttttttcagaagcaagggtttctttcatcaagaatacttctgtatctgcattgccaatgcaaaaaaacgcaccccttgtccgacgggtgcttttaatctctatctcgtactgttcccgcacttcctgttcatactctctcatgacatccccctgttcccgtgtgcggacgctcttttaacgcccgcacctctattcaagttctttctaatctatgaacaggttctgccaagtatgcctgaaagctgcgattaacttagaggttcaatttattttttacatatgcacaaaggatttccttatcgtttcttgcaggatcatccagtacatattccagtaattcactgagcatactgcccagctcacgccccggcttcattccgagatccatcagttcacgacctccgaccgcaagctgtctgagcgtcacacactcctgcttctttataatctcctgatacagcctacgcatttctacgatattttcaatcttttcccttttctgatacggactctgtgcctttacatccgcaagacgcgctgccagataatacgggaacagctccacaccgatccggttcatggctctccgcacattctttggtgttgcctccacccggtaatcatgatagcagaccagcttcgtaaccgttcggatcgtctcattgtcaaacttcaatctgtgcatgatacttcttgccagctcctcactgaccagtgcatgtccacggaaatgatcccgaccattctcatcggtggtcttcatcatcggttttcccatatcatgaaacagcatcgtaagccggagaatcttgtcacgtttcacatttttcaatgcccgcagtgtatgctctgccacatcatatttatgatgcggtgtattctgtgccacacctttcattgcatcccactccggcagaatcaccttcgtcagtcccagttcgtatgcatcacggattcgctccgggtgaggtgataccaaaagtttcaccagctccgcctgaatcctttccgcactgatattctgcagattcggagcaagtttgcggatggcatccgctgtagccgactcgatcgggaaattcaactgtgccgaaaaacgtaccgcacgaagaatcctcagtgcgtcttccgaaaaacgctcctcaggatctcccacacaccggatcagatgatggttcagatcctgcattccgccaaatacatccaccagacgcacctggtcattatacgccatggcattgatcgtaaaatctcttcttctcagatcctcttccagccggttggtaaactgtacctcctttggatgtctgctgtcctcatatgcaccatcgatcctgtaggtcgtcacctcaaagctgtccttaccgaaaagaaccgtaaccgttccatgctcgatccctgtatcaatcgtcctgcggaacagcttttttatctcttccggctttgccgaagtcgtaatatcccagtcctgtggccgtcttgcaaggatcgaatctctcacgcagccccccaccgcaaatgcctcatacccatgaagctgcagattattgattataaataaaactttttttggcagttctattttcatgtatctatcttccttcctgaaaacgtcagcatcttctcaaaaattccatttctcttctctgacagcttaatattataacttgtctttcctgctgactcaaccattttagtacagattgcagtcttttatcatcataaaatgcaaaggtttcatccagaatcaccggaagttcttcctcctgaagcatttcggctgccgccatcctcagggcaaaataaatctgctccaccgttcctctgctcagccggtatgccggaatccgcctcgttccgtcccatacagaaatttccagtctgtcactgatattgactcccggatattttccctccgtaatttcggaaaaaatctcagacactctccggttcagtcctgctgctgtccgctctccaagatgctctgccgcctttttcatcgtctcttctgccagttccagtgcctctctcctctcatagagtctttcctctgcttcatccggctgcagttctctttgctgctctttcaaattctcgtaccggagcttcttttctttccactcttccctgatctgttcctgctgccactgaagcttctgttcctcaggatcgttctgctcccaccagactttctcaccattctgctccggctgtccggtctgaaccttctctttttcctgcactgtgcgggttccgctggatttttctgtttcttttattatttttttctgtcctgcttgcttacggattcccacaacaaacagcacacagcccgcgatcactaaaagtactgccagcagtacaaacgcggaagaccgctccaaaagtacgtcaactccggatttatctcttaaaaatatcccccacaaaagccctgccagtccggcaatgattcctaaaaagccaccaatgatcattccacggctgttctcttccggttgttcagaagcagattccgtttcacccggatgcaaatccgtttcttttgaatcattttccttctgtctttgttgcagcagacggattctctgctgattttcttcatacggtgcctgaaactttctcatatctttttccagataggtacattcctgctccatggaaagatactttttttctctctgttctcttgcaaatctgcactgttgctctactgcttttttccgttctctcagatctgaaatcgcaccgcttaaatccagttccccaccaccggtctcataataatttgccgcataatttttcagactttccgccagttcctgtcccggtctgctctgaaactgtccgatcgaaaccgtattgtcatacatccccggagtaatccctcccagcagcatatccagatccccatgctctaccgaaagctcttccccatcatcttcacagaccagtgaaacctgctttgagatccggtcaaaactccgttccagccggaaattcctgttaccacagcgaaaccgcattactccggcataataattcggattttcccacggctggtacttactgaaatcatcctttgccgcagcttttcctcttccccgctccattccgaacagcatcgccctgataaatgcctgcaatgtagattttccatactcattttctccgtaaatgacctgaacaccatccttgatatagaaatgctgctctgaaaatctgccaaaatttttgatatataattccgttatcttcattttccgttaccccttattcttaaggagtacttcaaccccctcatacaatgcctgatattctatgctgtccttttcgcagtctttaaaccgacggatatactctcccagcagatttccttcattttcctgcaacaattcttccatatcatactgcggagcggtctcatcgatcacttccagaagattcccgtcccgatccattcgctctgtatcaaaccgcagatccggatcccgatatcccgtaagaatgatcttatacatattttctgctccatagtccttcacggcctccagaatctttttccgcacgctccccattgtatcttccgtattaaccggaacttccagatgaatataggatctcattgcacacggaatccactgcgtatgaaccccggcttccgtaatctctccctttacatagccgtgtggccctacatcattccggtcaatgggttctaacgctcccgcataaatgatccggtctttcatcagtgcctgcggtctgtggatatgtcccagtgcaatataatcaaatcctgactcttccagctttttcacccggaacggacaatgcttctcatctccaccatgggcgagaagaatctcatactcctggattcctcccgcaaacgccaattcatacagaggctctctgatctccctgctgtaataactcagaccatacactgccgtcctcagttccgggaactccacatattccagttcccgcccgaataaagggattacattctcattccactgaaacgttctgtaataagaatcctttcttatataatcatggttgccagcgatcaagactacttttgtatgcgtcagctctgcaaaataataattcagctcttttaattccctgcgaagcggctgcccgtgaaaaatgtctcctgcgatcagcagaaggtctgtctgctcttcctcgcaaacctcaagaaccgactgtagtgtctcccacaattcctgtgaccggttctgactgtatgctctgcctgcatccggctctgcaccaagatgaaggtctgctatatgaataaatttcatttccaattctcctgctttcgtatgataacctgataacttttacttcttgttgctcagcgtctatagatagggaagtcatttcacatctgatagaatctgatactctatactataaggcattttctgagcttttggcaatcaaaaaaacagaccgccggctcacgcacacagaaatgtacatcaaacggcagtctgtctttatttatgatgccagggtcaaaaggtctaagcccacatgagcttgctcacaggtgggtgaaagaccttaggacccgcctcgatatgagcataaaagtgggatgataatcccacgatatgcgaagattgggtaggattgtgggagtgcgtagcatgaaacaatccgtaggcatcaaagtcgggggcttttgaccccgacatctatttatttataagctcaaaaggatccattctattacagttcacagttatttacagttctcgggaacgggatcacgtcacggatattcgacattcctgtcagatacattacgcaacgctcaaatccaagtccgaaacctgcatgtcttgtagaaccatattttctgagatcaaggtagaaatcataatcttcctctttcagccccagctcctgcattcttgcaagaagcttttcatagtcatcctctctctgacttcctccaatgatctcaccgattcccggaacaagacagtcaacagcggcaactgtctttccgtccccattcagtttcatatagaacgctttaatctccttcggataatccgttacaaagaccggcttcttataaatctcttccgtcagataacgctcatgctctgtctgaagatcgcatccccatgaaaccttatagtcaaacttgtcattatttttctcaagaatctcgattgcttctgtataagtcacacgtgcaaagtcagaatttactacattatgaagtctgtccaaaagtcctttatctacaaaggaattaaagaagttcatctcttccggtgcattctcaagcacatagttgatgacatatttcagcatggcctctgccagctccatatcatcttccagatctgcaaatgcaatctccggctcgatcatccagaactcagccgcatgtcttgtcgtattggaattttcggcacggaatgtcggtccaaatgtatagatgctgcggaatgcctgtgcataagtctcgccattgagctgtccacttacagtaaggcttgtctcttttccaaagaaatcctgtgtatagtctactgttccatcttcattcttcggaagattctccatatccatcgtggtcacacggaacatctctcccgcaccttcacagtcacttcctgtgatcagcggagtatgcacatatacaaagcctctctcctggaaaaacttatggatcgcatacgctgcgagtgagcggactctgaatacagcctgaaatgtattcgttctcggacgcagatgagagatcgttctcagatactcaaaactatgacgcttcttctgaagcggataatccggggcacttgcaccctccactacaacttcatctgcctggatctcgaacggctgctttgcctgcggtgtcgctacaagcgttccctttacgactactgctgcacctacatttaatttggagatctctgcaaaattctccatcttatcgtgatatactacctgaagcgtctcaaaataagatccatcatttaacacgataaatccaaatgtcttagaatcacgaatacttcggatccagcccccaactgtcacctgcttgtccagatattcttctctgttcttaaataactcacgaattgttgtcagttccataccattaaaactccttcaaaaattgtctgccagacgccgtacctctcatactgcgatggttctctcattctgctgtccttctcttctttggacagccttacagataattataccactcttatcctcaggagtaaatataatgttggcttgagtttccgcagttttatccacagacctctgattttgctccattcattatccacaactttatgaaagtgtccaaaatataatttccaaatttaagatttttcattttctgttctgttagcaggagtcttcaatgtgatggcatatactgtacctacctttaaagggtatgtttccataacattcccatcgtaatatacaacaatttcgtcaccaacaacagggtctgcataactatctttgttctccacagtcaatgatattgaccaccttgaaccgttaggataaccctctgccgtttctgaatacataattacataatcatcatgcacttcttctacaacgcctactacacttggctcattttcaataatgtagttcatacttctgttattgcacccagccaataccaacacgaatgttagcgataaaatcaatgctataaaccttttcataccatcacgctccttatcaaactgcttttgccttattttttgtcttggtgatccaacacatagataatgcaggcgataccagaaatcaaaacaccaagaatacatccaccaatagcattgttaagcgtggctccaaggaacaatcctgcaactccgcacaaaatcattataattacagccacaaccgttctaaacttgctcatattcgcccctccattaaatgtcttgtttcttctgtgtgttacgcttcttgttaaacaacgaacctatcagcataccgattgcagaaattattgcaccaactacaatcattccccaatccggtgcattcagtttgtcaaaagcaatgttgtttgccattttgaatgttccgtattcagcaagcatatacattactccgaagaaaagggtaaatgcccattttcctttttcccaaaagtcatttttgccgataacaatggacacaacgaatgtagttacaggaagaataatccaaaggaacatcaaactataacccatagcatcacttccgcttgtaaagaaccagaacacaatcatggcaaccgcccagatcagcagataggacagtattgtaatgattttgtttctgttagtgttgcttttcacaacatttgtactttcttcaagataatcataataggtcttcattttttgttctcccttcaattacttattgctttctaatacggtgtcggttaaactaatcatatgggacttctcctttgttgttattttgattagacaccttaattttaacaaacttgaagtcctttttgtatgcaatttttcttgatctgttaagtgaaagcaaaaatatcaaaaaagcaagtaactatgcggcgttagccgtagtggaatgaattatcatgaataattcaggattcattataccaaaaaatcgcttaaacctcgcgacctaagcgatttttctttaaggggagtttttttacagccccgatatgcgaatattgggtaggattgtgggagtgcgtagcacggagcaatccgcaggcatcaaagtcgggggcttttgaccccgacatcatgtaatcactttagcatcaatctccttttgaaaagtaacatcatgctccacgagaagcattgcaggagaaaactgcctgatcagctgcccgatctggattcttgaatacatatcgatatagtttaacggttcatcccatacatataaatgcgccggttcacaaagacttttggcaatcaacactttcttctgccctgctgaaaaatctttcatatccttttcaaactgcacacgttcaaaatccattttcctcaatatcgctttaaacagactttcatctattttatgaaccttagcaaactcggtcaatgttccttttaaatgtgacgtatcctgcggaacataagaaatgacaagtcctgatccactcgtaacagttccggtatgttcgatcggatattttaaaagcaatttcaataaactgctttttccgcttccgttttttccttgaatacgaatacgctcaccccggcatatctgaaatgtaaccgcatcacacacttaatttccttcataaataaccgctacatcagaaaaagataccagtctttcattgtatctataaaaaaacatctccccttacacttgaaatccatattcttctagtataaaataattgcgttaattatttaacagaatacacaggaatgaggaatttacatatggaaaaccattttaatactccggctgaagtaattgatctgagcatcaaagcatgtgagaacaaaacaaaactccctatcgggaaaatgatccttctcggtattatggcaggggtctttatcgcactgggcggtgctacaagcagcacagcggcacacgcagtagaaaatgtcggagtggcaagagcattggcaggtgtgatctttccggtcggattgatgctgatcgtattcttaggtggagaactttttaccggaaactgtctgatcattatggacgtatttgacaaacgggtaacctggaccggactgttccgtgaccttttcatcgtatttttcagcaatttgatcggtgccctctgcgtggacgtactgatcgttttcagcggaaacttaaattactccggtggtcttctcggtgcttatacgatcaaagttgctgtcagcaagatcgcgatctcaccggtacagggcatcacctccggtattttgtgtaacattcttgtctgccttgcagtactgatggcgacttctgcacgtgatattgccggaaaggtatgggcgatcttcttcccgatctgtgctttcgttgtaggcggttttgaacactgcgttgccaatatgttctatattcctgccggtatcatggctgccatgaacccggattatgtggtaaaagcaaaggacgcttacggactgaccgcagaacagatcgctacactgacccctctgcacagcctgcagaattttatcccggttactttgggcaatatgatcggtggtatgttgtgcgtcggacttccgctctacctgatctacaagaaaaaatggaattaatttagaaatagaaatggaaaacccgttgatatgcttgcactgcagcccgatgtaactaatgtggacgacacaactatgccatatatctacctgaacaatgccatgcttttggctaattattttgacaagcggcagaatatgaaaaagcagcctggggcttattttcacattggttatcctgcgatgtactttttctataattttttggagatcatgtttccacggtttacaggattttataccgtacatggaccatctccgttaaaaaagagtacttatgaaactctctggaatctagagggagagtatctggatcaggtatgctctcatcctttccgtcacagagaagatgtcagtcagtacgttatccgggaatatcagaaattaagcggaaattttatttcgaaaaatgtaagaaagctttaccggatcgttcttcttttgaacgttactgagatcactcagcgtttatgcggtgactaaaatattaccaaaaaatctcctgatttttcccgtatatctggcaacgcaaaaattcccggaaacaaaccgtttccgggaatcttcttttaagaggcgcagaccggatttgaaccggtgcatcagggtgttgcagacccacgccttaccgcttggctactgcgccttaacagatgttgcactcgcaacatccgtattataacaaaatatatttttcaagtcaagattttctgatctgcatttcgcaattttccgatctgcattttataatttacattgtaaaatgctctcccattcaaaaaactgttgtgctgtccgctgtcattcgtgctatactgattcttatgaagtgatgattatgctcttataaagatgtcggggtcaaaagcccccgactttgatgctcatatcggggcgggttctaaggtctttcacccacctatgagcaagctcatgtgggcttagaccttttgaccctggcatcataaaatttgtaaaggagttgttgagctatgaaccatagaatcccggaagaattaatcgaatttatcaaggaaagccctactgcttttcatgcagtcagtgccatggctgtccggcttacagagtccggctttatcagactggaagagggaatgcactggaatcttaagcagggcggttcttactatgtgacccgcaatgattcctccctgatcgcatttaccataccggagcatccttttcagggaatgcggatcatggcaagccacagtgactccccgtcctttaagatcaaggaaaatcctgaaatggaatccgaggggcattatatccggctgaatgtagaacgctacggtggaatgctctttgccccctggtttgaccgtccactttccgttgcaggaagggtgatcgtaaaagatccttccacagacggaaagccttctgcctgctttctgtcaaagctggtcaatattgacagggatcttctcatgatccctaatcttgccatccacatggatcgtgatgcaaataacgggcataaatacaatgctcagaaagatatgctccctctttacggtgatcttacagcaaagaataccttttttcagaccatcgcagaggcagccaatgtaactgaagatgaaatccttggtcatgacctcttcttatataaccgacaggaaccttgtatctggggtgcatcccgggaatttctttctgctccccggctcgacgatctccagtgtgcctttgcctccctgaaaggctttctttccggagcaaaggaagattatctggctcttcactgcgtttttgataacgaagaagtcggaagtggaacaaagcagggtgcagcttctacctttctaaaagatacactgacaagaatccacagaaaccttggatataatgaagaggattttcttgtgcatcttgccaacagtctcatggtctctgctgacaatgctcacgcagttcatcctaattatacagaaaaggccgatccaacgaaccgaccttacctgaatgagggaattgtcattaaatacaatgccaatcagaaatattgtactgatgccgtttctgcagccatgttcaaggatatctgccataccgctagtgtcccggttcagacttttaccaaccgttccgatatggcaggcggatccacacttggcaatatttccaacacgcaggttgcactgaacactgtcgatatcggactgccgcaatttgccatgcattcgccttacgagaccaccggtgtcaaagatacagaatatctgatccgtgccgccacagaactttttgcttaatcctatttcagataccagggtcacaatatgagcataaaagtggggcgtaagcaccacgatatgcgaatcttgggtaggattgtgggagcacgtagtgcgtaacaatccgtaggtatcatagtcgggggcttttgaccccgacatctatttcagagatgccgcactatcatctgttgcagatgagggtacggcattttcttttatacccgcattttttcctgcctctgtgcgaaccggtgtataaactgcattgatctccagcgtatcctccgtatgtgccatccacaaggtgtaatctctgatactcttttttgtatactgttcctgaacagaatacagttccatcgtctcaaaatctatcagtaccaggtcgacaggctccggttcttttccctcctcacattttacctccatcgcttcagacagcttttccagacaggactgacacaaaatctgcgatgccttttccatggaaagtactctgtcctctccataatctactacgatttccgaaataccccggagactttctgaactacgctccagaactcttccatttttcccaaccgttgtccttgtcgtattctttccttctgtatcttccggcatatttcctttctcatctccacttttgatcttcagatccataatgtaccagtcattcacactgatgataccaatcgcatcttttccgctgaacatccccgtcatacttccttttctgctgccgcacaaagcacattcttcctgatctgtcagctttgtctcaggcactttggcttttggaatgaccagtctgcttctctctttgcagaaacatcttctttctctgatgcatttgaccagaactgtatatatgcccaccacaaaacacatactatcactgcgatccctcccaggatcagccataccgttcttttcttcatactacgatcattcatggattttttcatttttcttcattatctacctctctttatctgggtgcgttgcactccttatttgtggcggtttcgttcatagtcagtgtgtggaactatccttatttatgaattatcataaaagatatatcaggaggaggagcaaaaagatgaacttacttaatagtaaaagcataggaagaacactgaaagagcggagactccaactgggttatactcaggaactcgccgccgagaaatcaggaatctcttactcctactataccaaaattgaacgaggagaacaacttccttctatagaaatttgtgttcagcttgcacagacctttcatctctcgctggattactggctgcttggtacatcttctgatgcggaagtatcctctgaattgatcgattttgcctattctctcagggagattgacctgaattctttaagaaaagtagagaagcttctgcaaaaagcagaattgcttacaaaataatttttctttgcattattttatgatgccagggtcaaaaggtctaagcccacatgagcttgctcataggtaggtgaaagaccttaggacccgccccgatatgagcataaaagtgggatgataatcccacgatatgcgaatattgggtaggattgtaggagtgcgtagcacggagcaatccgtaggcatcaaagtcgggggcttttgaccccgacatcataagatatagaaaaagacgttccggtgacagagtcaccaaaacgccttttcaaggggctgttcataattccagtgcttcatatctgctccacagattgcagccgctttgatctcaaggatgatatcctccggtccgcatgttggatacggtacttctaccaatttgtagcttccaaattctttaccaaatcttgcgattgccttcattttcatagttcatttctcctcgtctgaattttgttcttaatgttacatttacttttttctttttcggccgaaatcatttgttttttctatggttgtattttaccgcttttctttgtttcaaagaaaataagggtatggattctggttttcaaatcccaaatccataccctaaaaaaactgccggaatatttctcagaatatcccgacagtcttctgtcattctcatttgtctttctttaattcctctatcacacattcatgggctttggttctgatattataattaatcccgaccaaaagtatatttccctgatattcttttaaactctcaaaatattctttctgccggatctgctcaatcgctcccctggcacttttatcccactttagttctacaatcaacgctggtttttcctgaaatttctttcttggtacaaatacaagatcagcaaatccttttccgcctgccagttcccggtgtacggtataaaaatttcttgctgcatataatgccagtgaaattgtataacttaatgcattttcgtcattgtattgtatatgtgctgtttcaaaatgtgcctgcctgattccctctgctacctgcaaaggtcgtttctgccagattgcatttaatgtatctgcagaatttttcaacgcagtcgacacttctccccattctgatacagctacactgctcacatattctccccgtatttcgttattagggattcttacggtcttattttcataatcatatgccaggtacccaaggtggatcagcagggtcagcacatcatcttccgtcctgaatgtagccatatcattgataaaactaccagtatttacaggaactgattctcctgccatcatgctcagtacatcttcccgcaatccatcaaaattcatatcaatataaatcttcaacgcttcaaacgtctccgtctgattccagtaatttccgattttaccaaatctcatacaactgacaaccgatcttggactgtaaacagccggaactttatcaaaagaatacccgtcataccagcattttacttcttctccgtccatcttatattcttcgcacaatgaagcaacttcttcttccgtaaatccaacatactctgccatcggtccgggatcaatcattgaaaattcatcaaacatattcaaagctgaatgagtcccatatttttttataggaagaatccccgtcatatatgcaagatggatacacggcttatctttcaacatatctctcagaaaatcaagataaatcgcctgtgcttctttgtcttctttatactcccgaaaaatgcagtcccattcatcaataatgacaacaaacggtcgtcttgtctcttcatatacatcctgcattgcctcgatcagatcattttcatcaaaataatccacatccgggtactctcttttcatatcgcgaaacaccagttttttcatccgctccagcaaatcgtatacatccctgcttctgctcagaaattcctgcatattaagagaaatcgtattataatgattcaaatatttttcaaaatctttgtcttttgcaattttgaatcccgaaaaaagtgctttggaatcacacccacagctataatatgctgtaagcatatttgccgctgtcgattttccaaatcttctcggacggctaacgcaaagatatccctgcattgtattcagtacctgattcgtatagctcagcatactcgttttgtccacataaatttcagaattaacaatcttaccaaatccatctgcattggaatttaaatatctgcccacgcatcttcctcctgattttctttttgcatactatttttattatacaccatattcggtgttattttctattttttcagcaaatcctgttcgttttcataatatcctgctttctttcatgatacaccgctttctttatacaacgtgctgtattttcagcgattttttcctatttccatgagaatttgcactctttttgatcattttcacaagaattttttcaattcttttgttgaaaatcttaatttttttatttttcaaggtatttttcagagaaaaattcttaatttttcaacctgtctgattcttctgttttttccttcccttgacatccggtgctatagtgtaactgtagcaaagaaaaagcacttaacaatacctacttgtacagaaagttgaaggctgctaagcggattcagaatttggaggaaaagataaatgaatactttaaaagctgaaaaaagagacatgtcaatcaaagccaaaaaacttagacgcgaaggatttgttaccggttgtattttcggccgtgaaatgaaagagagcattccacttaaaatggaaaaagcagatgttgaaaaacttctgaaagttgagaacaaaggtggacaggtaatgctcgaagttgatggtcagacttatgatgcactgatcaaagaagttgattataatccattaaagggttatgttgatgagattgatttccaggcacttgtaagcaatgagaaagttcattctgttgctgagatccatcttgtcaaccttgataaacttgctgccggtgtaccacagcagatgttacaggagatttctttcaaggctcttcctgctgcactggtagagaaagttgaagtagatgtcggagatctcaaggttggtgataccatccgtgtggctgatcttccgatcgccaaagacaaagatgttgatcttatgactgatgttgatgctacggttgtaacgatcacagaagttcatgtaaaagcttctgaccttgaagctgaagatgctgacgcagccgaagcagccgaagcaaccgaagcataaagttatcatatgcagaaaaaatctgctatataagagaagagaacctgccgttggcaaggttctcttctcttatattcgtttttctgtattatttgatatatccgataaaggtatttccacttcccgccaccatagcattcatctcatccatagtcacagtctgcgatgcccccgtatccgggtcagaatatgtgatatccgtcttagaatatccggtcatcaggatcgcatgatctgcacttgtcagagcgatcactgggcagcctttattgatcacatacaatacctgatccagcgtacagcccgtaagatctgtcttctccgcctcatacgatttcatataccgttcacatgcttccagtgaactttctccgctctcctttgtcactacaacattttcaatagaatacaccagatcccggtttcctttttcccatacataagcctgttccgacgagatcacaacaccggaaatcttctccgccttctggatcgcatagccggctttatcgtagattccgaccagttcacccataccatacacataatattttacacgatcatcttttcctttcagaacaatcgtcagtgcattttcagctacctgctgatccggttggagcagcttcacctccgtcttttcgattccctctgcaaaagtaaaccggtactgctttcccagcttctccgaactgtatgaggtaagagaaatcttcgtatctttcttttctacattatttgtaatatattcctgtgaagtaacattatagatctctcccgctttcgcaagacggttcagtgtcaccatatttccctcgatcaaaatatcagaaatatagatcccctgatcttcaaaggaatactctgctatttttttatttttcgaatcatggatctcaagctgatacatcggagttgtcttctcaccggatgccgtctttccggcatcggaagtccgcaaaattccataaataaaatctccattcaggaatcccagcgggcgaacggcttcattctttgccgctttcacactatattcatccccgctggaaagatccatcacccggatctcctttgccgcatctttctctccgtctgtctgataagcaagctgatgtccgtcatcagaaactgcatactttccggcttccagaccttttgcaagcacttcctgctggttcttatcaagatcgatcctgtagaggacctgatctgcaagcacatacagcagctcctgtgcatgattataataaaccatctttcccagctcatcttctgcaatggcaaaagattttgtactcggaataaagcctttctcctgaatcagattgctgtccacattaaaataataaataccgacaccaacttctccttcatgctctccccggttcatatatccataaaccgcaaaggcaatattcccatgatcgtccatactgatgatccgtaccgcatgctgatcattcaggctcctcacatcctgtgtatcttcctccgcaaagctgaaaactttcgtcagctcctcatttttcttattatacatccacaaagtacggttctgcacaaaggcaaggatcgaatcctttttatttgtctcataaggcacatcttccggcacgattccaagcaggatacccttttgatccatcacacttctgctgctgaacacttcctgaagatcccggttataatccagcaggtagatcgtatctcccaccgaccggatcctgaaaaattctttcacattataccgtgccgtttcctctttatcatcctgacaacgcacctgatattttgcaagaatggatgtataaacactgttgctttctttcagactccactgcacatcgcccacgatctccgggttcaggtctccccactggatatgagtaatatctgagtggatattgacggtctggtaagtcgtattatcactctcttctcccggctcaagatacatactcagtgtatcttcatcactctgatccaatgcctttgcatgaaaatcttttgcaaatgtaagacatttccacgcagtaatctcatccggcttctcgatccgggtgaaataattcacctttttctgtgcttcaccacttcccagtgtcagagtcagcttcagcaccgcctcctgtgctgactgatccagggcagtccccagttccagcgtaaccttcccatcctcttctttgacttttccttctgcgtaagtatctgctccatccagtgaataaactttatagctgatcttactgatcttatttccattctctgcgatctcagcctgaagcgttccattgctctccagcggagtgatcgtatcacgcatggcagtgacatccatctggtctacatacccggacagaagattgatctcctgaccactcacggtaaaagaaactaccgggagtgtcggctcgcccattgtcataatcttatcgtccgtcccacggttcatcacataattacttatcaacaatgctccggcaaaaaataccgccagcacgattccctttattattctttttatcattatttattctccctgaaatcccgtcgccagtgcttatccttttctatgatccttttctatgatccctttctaaaatcccgtcaccgatgcctgctcttttctgaaagaagcctgcccagtgtcggctggatattcagaaatgcttcacactcttccagcttctttctgctctccgcttctattgccccatcagtcttccccctcctgactgcacgcagcagaatattcttcggtgtatgttccatatcaataaattccagtacctgggtttcatatccctcgctttccagatactttgccctcagtccatctgtcaccagtgctgcgaaccgctctcttaacagaccatactccatcaccgtagcaagtacctccggggtctcccccgcttcaaactgctcattgatctcatgctggcagcatggaacggaaaggatcacttttgcattccagccaactgccttcgccagtgcatagtccgttgccgtattgcaggcatgcaacgtcaccaccatgtccacacggtttactccttcataatctgcaatatctccctctaaaaactgaagcttttcatatccgtacttctctgccagctcattgcagtgccggatcacctcactcttcagatccagtcctataatgcgtatgtcatattttttcaattcatgcagataataatacatcgcaaaagtaagatacgacttcccacagccaaaatccaggatcgtcagctctcttcccctgtcaagctgcggcaggatatcttcgataaattccaggaatcggttgatctgccggaacttatcaaatcttgtatgcacgattttcccgtcctgcgtcataactccaagatcctgcagaaacggaactttcactccttcttccagaatataccgctttttgcggttatgggacaggtctgccgcctttgctctgatctttttctgctttctgcggatcgtcacctttccctttttactgatcagcactgtacagtcctgactcaccgtttccagttgcatctgtccaaaacgctccatcactgtagccaggatctcacccgccgcttcgggatttaaatttcggtgaaatgcctgcgtcttcgtaaacgcttctaattggaacatcaattcccctcttttttccagcggacgtacttttatcttcaaaatcccctgaaccggttctgttccacactccagcagcaccgcagttccttctttttcctttggactgctgatgactgcacgtataaattctctatttaaaacttccttcagaagcttttttatttcttccatatatataactccatcctgtcgtatgatacgacggaaaatctcttttctttcactttatcaattcttattttgcagaatattcccgaagatgtcaagaggtcagacaccggttcctgatgtctgacctctctttctttcgttatacgtaatactgctttttttcccattcttcctgttctagaagaaatcctttctcccggagtgcagcctcgatcatatccagggtttcctcactgtcagcctccactacatggtaatgataatctgaggtaatattctttaacggactggattttcccgtcttgatatcatctaaaaattccgctgccttacgcctggaagtaatattcagctccgcttccatatgtccatagaccctgtggtttaccatgacattttttacacttcctccaagatccacaatagaatataattcttcttctacctgggcatccgtatgctttaccttaaatgtccgctgtacggatgcatcctcattgagaagatagcccctgttagtggaaatgatctcatgtcctgcagcacggatcagtgcaatatcctgcacgatcacctgacggctcactgcatactgtgctgccagtgctttcccggatacagggacggtgctgttctttatctgatttataatggcagttcttcgttctgatcctgtcatcatacctcttcctttctactactgtggtttctcttcttaatttatagcatgaaggtttttcatggaaatgtcaagtatcggtgcagaatgtgtcaatgctccactggaaatataatcaactccaagtgctgtcagtctgccgatattttcctttgtcacatttcctgaacactctgtctctgctcttccgtcaatgatccggattgcctcgctcatatcttccgttgacatattatccagcataatgatgtctgctcctgcctctgctgcctcttttaccattgccagattttcaacctcgatctcaatctttcggacaaacggtgcatattcctttgccattttgactgctgccgtaacactgcctgctgcaccgatgtgattgtccttcagaagtactccgtctgaaagattataccgatggttgtaaccgccaccgacacggactgcatatttttcaaaaatcctcatgttcggtgttgtctttcttgtatcaagaagtttcgtcttacttccttccagcagagctgctacggagtgtgtataggttgcaattccgctcattctctgcaaatagttcagagccacacgctctcctgaaaggagaacccggatatcaccggtcaccttgcccatcaactgaccatttttgacttcatcgccgtctttacagtaaaattctgtctccgtcttatcatccagcaattcaaagaccctgcgatatacatccagtcctgcaataataccgtcctgcttgcagatcagttctacttctcctttgacatactccttcatcaccgcattcgtactaacgtcctcactggaaatatcttcttttaaagcctccaggatcagatgatctgcctgaagtgtcattgtaattgtattcatacctgttctcctccaattttctttgccgcacgcttcgcaaacaccagactctccaatagcgaattacttgccagccggtttgctccatgcactccgttacagcttgtctctcccacagcaaaaagatgatccatcgaagtcttactgtcagaatcaacccatactcctcccataaaataatgctgtgcaggaacaaccgggatacattccttcgtcacatcatatccttcttccagacaatgatggtaaatattcgggaaatgattcagtattgtatctttatcaatccgttccatggaaagccatacatgatttgttccgtctttcttcatctgtctccggatctcttctgttaccacatcacgcggaagaagttcatttacaaatcgttctttattcttatctaaaaggatcgcaccctctccccggacggattccgaaatcaggaaacgtcttcccggctttgtggaatacagtgttgtcgggtggatctgcacataatccagatgctccagacggattccatgcttttcagaaatatccagtgcatcccctgtcagatgtgggaaattggtagaatgctgatatcttcctccaattccaccgcttgcccagatcgtattatctgcataaatctccagttcctgaccgttctgatcctttgcgtaaattcccctgcagactccatcttccacaataatgtctgtcattgtagtatattcgtaaatttccacattcgtaagcttcttcacctgtgcaagcagcttacttgtaatttcttttcctgtaacatcctcatggaaaaggattctcggtctggaatgagccccttctcttgtaaatgcatagatttcttccaacggcttatctgtttccggctctcttcctttttcctgatttccttcttcagcagaattaccttccggaacatctgactctttctgaaattcaacaccatatccgatcagatcctgaatgatctctctggaactgcggatcataatatctactgattctttcctgttctcataatgtcccgctttcattgtatcttcaaaataactgtcgtaatcatcctcatcatgaagcatacagattccaccctgtgcaagaaatgaatcactgctctctaaatctgactttgtgatcatgatgatctttttatctctgggaagattcaacgcactgaaaagtcctcccacacctgttcctacgatcactgcatctgctttcattttcataacaaactccattcttccggctcttattttgccagttctaacattctctccaaaggttttttggattcttcccgaagtgcatcatccacaaaaacttcattttccccggtctttaagacatgaagaatcttttccaacgtcacttttttcatatttctgcatacaggaagcgtttctgtaaaatagaatttcttttcaggataccgtttctccagctcatacaggacaccactctctgtacagatgatcatctcctgtgcatccgtctctcccgcataattgatgattccggttgtacttccgatataatctgccagttccagaactgcctgcggacattccgggtgtgccagcacttctgcatccgggtgtgctttcttcgcatcctgaatttcttctacttccatatactcatgtacgatgcagaatccttcattataaataaaatgcttttccggtacgagtcctgcaatataatgtgccagattgcgatccgggataaagaaaatatttttattcggaaggttctttacgatctttactgcatttgcagaagtaacgcatacatcagaatgacgtttcaattctgcagttgaattaatataacagactaccgcaagatcatcatactccgcacgcactttctcgatcgtttcaggggatgccatatgtgccatcgggcaatctgctgccatatctggcatcagaaccgtcttttccgggttcaggatcttggcactctcacccataaaggaaactccgcaaaatacaatcgtcttttctttcaggcctactgccaccttgctcagataaaaggaatctcctatgtaatccgctatctcctggatctcaggtcttacataataatgagccaggatcaccgcatctttttctttctttaactgctctatctcttctttgatcgtcatatctgcacctctctgttttttcaaactttacttttctgtgggttttatttttcataagttatgatgtcggggtcaaaaggtctttcacccacctatgagcaagctcatgtgggcttagaccttttgaccctggcatctaagttattgatcagcgtaaattataacaccgcagtttacaggtgacaagacagatgttttgacaaaaaatagtacggaaaggttaaatgtttgtgaaaaatgccacaatcctttactttcccgtaccttttcttcatttttatatggatctgcttttatcttttttcaattttcttattctgtttctattctctccgatactttgtcatgcctttttcttcctgccagcagaaccgccataattgcagatgctgccggaattgtcagcacgatcccgaaagttccgcaaagtccctgtgcgatctcaatactgagataattggaattaaaaagctggttaaactgcacctgatacgaaataaataccaaaagactgatcaaggcactgcccgtaaatgccagaatcagagtatttgtcattgttccgatcatatcctttccgatctcgatccccgattgaaaaatttcctttgccgtcaatgcaggattatgtaaataaacttcataaagtgcagaaacaatcgacattcctacatccatgatcgctcccaaagaagagatcagcacccctgcaaacagtacatcatggatctgtaaaccggttccttcattaataaggatcagtccctctgcttccgaactgctgaatccatcaatatggagtaatcctgacatcacagtaaagaataccagcgagaagaacattccaatcacagttgccagaattgcagccgctgtttttttactttgtccgtttaacaacagaagtgtaaccgttgtagaaagtactgctgccagaatacttgtccacaccggtgaccatcctgaaaaaactgccggcaataagaaaccgatcacaacaaataacgaatacagtaatcccagaactgcccggattcccttaccaccgccaatacagatgaccgcagccacaagaactgccgcacatgccagcatggcaaaccgacggtcataattaaataccgtataatacggctcaactttatccggctgatctacattaataatcaaaggcatattgactctggcaagaacattatgcgtctttgtcagataatttgttacttctatgaccgttcctttttctgttccttccgtcattctcactttcagattctgtgtgccaagatagattttcaggctttcatcatattcaatgtcttcatcagaaatctccactacgattccttgatcgtagtggagcgtatctgtaacatatcttgaataggatttatatccgaaattctgtagcagcatcaccagcagtacagtaagaaaaatgattccgagaaccagactgtcttctcttatttttctcagcatatccgttcatcctgtccttctctgtcttttttaattttctctctttcttgtcgcatatacaaccacaacacttcctgctgccagcatcatcagtcctgctgctgccacatctgttgcatctccggttttaactgtcgctgtctttcctgtcttcttcacggaagtatcatttacattttcactctttggagtacctggttttttcgtaccaggatcggctgtctgaccgtcattatttgttccggcattgtcttttccaccattggtatctccattatttccaggattttcttttccatcctctttcgccggagtcttcagaccagccagtgcattttccagtgtttcacgggcggcatcaatttctgcctgcgtcgcatcctcatttgcaagcactgcttttgcattttcatatgcattctggaatacgccccagctctctgctgtatagtctgcttctttcaggttctttgcctctgtcccactgaccagttcctgtaatgcagaagagtctgtcttattgatcgtaaactgatccagcacttccatcgtatctgcataataagttgtcattgtataagaggtgtctgttacgtctatctctgttaccgttctccggtaagactgatccatctttgctgaatactctgcatttggggctttaatatcataatatttacttccgctggcggagtttgctgtcagataaaggattcctgtcggattggtcacactgctcttctctccctgtgccgtatccggagtatatccgttcatcatatacgttcttgtatagacatgatcgtgccccatcagaaccacatcaatatccaggtctgtaaatacctgtggcagttcttctcttctcgtaataatatcagaatcatttacatggcttgctgttgaataaatggagtgatgaaataccaccgtcttccatttcacatttggatttgcggcgatcgcttcctcaataaacgctttatgctccgctgtggaacggttattggagttgatgtctataaataatgtattctcatacacaaaccaataatccgatcccgctttggtcacacccttgtcagcactttcatttggaagattaaaatgctcattatatgccgcagaactgctgtcatggtttccgatcgacgtagcactcggcagagatgtgaacgctccattgagatagcctgcatactgggtttcattacttgcagtattgacctgatctcctgctgagagaaggaaatccgggttcagctttgatgtaataacatcgatcgtcttattccatccttccgtatcgcttgccacgtttccacccgcaccgatctgtggatctcccacaaatgcaaagctgtaagagccatcattcactccggtcttaaacgtgtaggtatcactgactgttgttccatttaccaccctgtatacatattcacttcccggctgaagtccggtcagtgttgcctgattggaataaaagccctgatcatttgctgctcctgatactgcctttgccgtctcatatttttccgggaatgcagcacctgacttcactgcatactgcacttcgcctgcctctgctgtgtccgcataccatgttactccctgactggatgtgtcactaccgactgtaaggaataccgatttctgtgttactggtgtttccgaaccatttccacctgttgtctcattataatttaatgtaagattctgaaactcaaaataaatatcggagcttgactcacgatcattatgaagctctacagaaaggacattttctccttctgtaaggaaatcttttacgtcctctttggtcagagtcagatctgcctgcttcggtgctcctgccgaaacgcccgcataaaaaagattgcctgtctgagcatccgttggcatatctactgactttacaagatgtccatttatgtatacagctactgcatcatcatggaacaatgttcctgtaatggatgtaagctggttcagattcgttacattaaatttcgttctgaaaaagaacgtcggaacatctgtcttggtctgatcaatatactgctgaagcagaaccgtcggtgtaaagccatcaaaggaagtcagtactcctctctttgccccaaatttccctgctgcctttttccatgcagtatcgtcaaaacctttttctgtccaggctgtcaacgatgccgttcctgcagccggatctgtattatcatctaaataattccatactgtattttcattgactactgttgtagaagatttctgattctgtgtctgtgcatgcactactgccggaaccattaaagccggtactgcattcaacgtgtaccctgctccaagtaaaaccgccagagctgtaacactaacttttgtcgtaagattttttgctttcattttttctcctcctgatgtcgatcccatcactttttctgcttcccttttctctaaagcggtctcaatataacatcattttcagagcggaacaatcaatcttacaagcatttaaaattctttgaaatgaatttaacaaagaacctgagactacacggaaaaattttctatatatttacaaacttctctgccactatccttgttgattcatttggaggaacttttaagattttcacttttttcccaagaacctccgataaaaggtaataacaatttttccggcacgattttgataaaaatatgcagaactgtcatagttatcacggacggattacgctataatgataacgaagaagaataacattcataatacgggagaattttatgggaaaaattaagatcattttctttgatattgacggtacattgctcagactgcgggcgaaagaactttctgaaaagacagttgaagcactgaaccgcctgaaagcaaacggaatcaggctctgcattgcaaccgggcgaacaccggtcagccttccccatttcagtgggattgaatttgatacattcctgactttcaatggttctctgtgctacaacgacacagaaacaatcttcagcaatccgatcagcccggatgatgttcaaaagctcatccgcaatgccgacagtctcggacgtccggtctctgttgccactaaaagccggctggctgccaatggatttgacattgatctgtcggattattactcgattgctcatttacaattaacagttgcggaagattttgagcaggtttccaatgaaaaagtttatcagcttctgctcggttgtcgcgaaaccgactattctgccattttaaaagacgtagatggtgcaaagatcgctgcctggtgggatcgtgcagttgatatcattcccgccaatggcggtaagggtatcggcatccagaaagtactggaatactaccatttagacaaatccgaagccctcgcctttggtgacgggaacaatgatattgaaatgcttctctctgtaggaacaggtgttgccatgggaaatgcttcccctcagctaaaagaagttgccgatgaaatctgcaaggatgttgccgaggatggcatttacgattattgcctgacccatggactgatctgaggattctatatataagattacatttactaagtaatgaacagattggaggaacagagaatgaaaaatctgtttgaacacacaagtgccctttgagtaaaatatagcagctatgaatatcgcactgctgatgatcgcactttatatatagtagtttcaggaaatgcaaaacctcagatgtaccgcccaatgcaggatgccaatgcacttgtccttgatgcggttaatattgatcttatgactatgcataaagcagataatgatatattgcaacagatggttcttgattttgtatctgcttatggattccttggttttatgacagcactgccgacaacggtacagtttgttacatatgaatccgtatatcttcctaaaaaccactttataaaagaagaaactctttcaacagaggattatcttacttacttctacccttttgaaaagcttgattttcacaagaaaggtacggaatccggatggtctgttgcagataaagatgaaattgctgttgtgatggcaatgggtaacagatgtgcttttcttttatgctgactgatgaaagctgtgaaatgaaattgtgtaagcactgtggtaaagcatttatcgcaagccgaaagggaaatgagttctgctctccgaaatgtaaaaatcaatataatgtgtataagacaagagctaaaaagaataatactgatgaataaaatcgtttttataacgttcaggaggtttgcacgcaatgagtgaaatcattaaaactaatacagaatattcaaagtggattaaagaagtttctttaagattccgcaacagccagataaaagctgcaacaaaagttaatagagaaatgctgttattttactggtctatcggacatgatatatcagagaattacaatgaagtcaaatacggaaaatcttttttcaaaaatcttagtcttgatttgcaggatgcactacctgatgtaaaatcattttctgtaactaatttaaaatatatgaaatatttttacgatttatacaacaattcaaatcgtcaacaacttgttgacgattcagacacacgaatatgtcaacaagctgttgatgattgtatttttatgattccgtggggacatcatattcagataattaataaatgtaagggtaatttagataaggctttgttttttgttaaaaagacatatgaaaacaactggtcaagagccgtccttttaaattttctcgatacaaacttgtatgaaagagaaggtaaagccattacaaattttgaaaagctgcttcctgatattggcagcgatcttgccagagaaatcacaaaagacccatataattttgattttctaactcttagagaagggtatgacgaaaaagaattgaaagatgcactcatggataatatccagaaatttcttcttgaactaggtcgtggatttgcttttgtcggtagagaataccggcttgttgtcggagatactgaacaatttattgatatgctgttctacaacatacaaaaacactgttatgttgtaattgaaataaagacaaggacatttgatcccggagatatggggcaattaggaacttacattgcagcaacagacggaatactacgtgcagataacgataatcctacaattggcttacttatatgcaaaacaaaagataatgttctggctcaatatgctaccagtgcagtgaatgttcctgttggaatttccgaatatgaacttaataatcttattcctgatgactataaaagttccatgcctactattgaagaaatagaacgagaactgaaagactaattccatacgcaactgcctcctttgtgttatgatatacaggtaagaaataattttcagactacagtaagtcattgtccacaaaaaggaaaaatatttctgcatgactcacccagtgaaaaggaggatatttttatgaacgatcagtggttagactttgcaatccgtattcagagtatcgcacaggcgggactccagtacggaaaagataaatatgataaagaacgttacaacgaattaagaaaaattgctgctgaaatgatggctgcaaagacggacctccccgtcgaaaaagtatacgggttattctgcaatgaaagcggctatcagaccccgaaaattgatacccgtgcggcagtttttattgatgggaaaatccttcttgtccatgaaaataacggaacctggtctctccccggtggatggtgcgatgtggatcagtccatcgcatccaacaccgagaaggaagtttttgaagaaaccggctgtacggtacactcaaaaaaactgatcgccgttcaggactggcgaaagcataatgtcatgaaccatgcctacggagttataaaaacctttatgctctgccagtatgaaagtggaacatttaaatcaaatatcgagactacagaaatcggactttttgaccgtacatccctccccaacgacctggcgattgaaaagaccacgaaagatcagatcctgatgtgctttgatttttatgagaacccggatgcctcgacattatttgactgactgaccgggcagtgaaaaagaaatatgacaaaaagactggggaatctctcattttcccagtccttatactttctctatgatccggattttctatgctttcgattctctatgattcagatacagataaaatccaagattcagaactactccgactgccgttgacaccggtgctgcgagtccgatctttgtcagacttgcatccggctgaatactcataaagtatgccagtggcagacgtaccagtaacgtctggatcagaccctgtatcataacccataccatcagccactctcaccctatagcactaaatttccagctccatagctttgctaatacattcttcaatatatctttcatccatagctgtattaaatgtaaggtcaacatttgccgctgatccccacacccgtcctgtatagtaacggtaattatctgcacggcgtctgtcttctttccggatcacctgctcagcttctttcttactgatattcagacgctccataatccgttttgcccttacttccaatggtgcagtgaagaacagttttaaagtcttctcattttcacgcaatacataatccgaacatcttccaatgatcacacattttcctttggccgccagctccctgattacttttgattctgcttcaaaaatcttatctttcggagcctcttcctcttcctttccataaagatacatctgatttacaaaatcatacaacagactgttggtcatggactcttctttctgacggataaactcggatgtcatacccgttgtaccggcgatcatctgaatgatttcctgatcgtaaaattcataaccgaatttttctgccagtttctttcctatgtcatgtcctccacatccgtactgtcttccgatcacaatcacattcttataaatactatctgcttcctgcttttctgccaattttcccgttataccatctgccaccggagcattttctgcatctgctgcagaagccagtgcctgtccgccttctccgttctcttccgggaacagatatgatttgataaactccagcctttttccaagcagtctggcaataaatccaaccagcaatgctgcaatgatcgtaccttcccggactccatttaattttcctgaaaatacaaaagaaagaacccctgcaatgatcgccatcgacgaatcaaagacaatcttcgttgttccaaaattggtattccatgtctgtacgatcgcccggacaaaagattctcccggcagcatgacaacatctgccagcacttccagataaacaccaaatcccagtaccagacagcctgccagcaatgcgatcatttttacaaaataattctgcggattgatccaaaataacatatacattgtcagatcaataaaatatccaaatgcgatggaaaccggtatctgcagaatattctcaagtttaaaattctttcttaaaatcagaatctgtaatacgatcagcaaaatactgaacacgattgtaaaatttcccagtgtaaatggaaaattcaggcttaatacatatgggatcgatgagattggtgacgtaccaagactcgcttttgtcaccagactgactcccagtgcatttacaaatagcccgattaaaaataatatgtacctctttaatttgttcataatctctctcctgtcttttctcatccttcaatagattttttctcactgatcagtctttttatttatagaagacgaacctgcttcatccaacagatttgcatagattttctgatatactgacagaaagtcttccatttcttcctttgaaataccttccactgccttcctttcaatctcagaaaatgcctcgctgaccaactgttgctttttctttccttcctctgtcataaaaatatgaaaactccgtctgttaccattgagtatctgacggcggatcaatcccttttcttccatcttattaaggatcgtcgtcaaagatcccgcctccaggaaacatgctttcgcaatctccttttgattacttccgttatgcctgcttaagtaatcaagaatcttcggctggccgatggtaagccccgtatctttcagcttatagagcaatgccttctgcaccagcatctgatttgccataataagataatgcaatgaatcatccatttcttttctctcctgctgttatttctttaacctccaaatgcacttcagcacattcccgtgttaaacgcttttaattcaaacagtttgaattataatttttttcgccatgtctgtcaaatttttgttgcaaaattttctcaagtcattctataaaagaattttctcattctcttttattttatgctatactgtttacgaaccatttgttccccacaggaacagctgatacagagaacctgccactggcagcttctcctgcatactttgacataaaaagcagtgaccgacactgccacagattttataacggaggacaataaaatgggaatacagtctattgatgcagaagacgatcagttcgcttatcgttatgatacacagctcctgatcgaaagacgcgaccgcgacctggatgaggatgaaatatccgactatatcacagaacattttgaaggaaacagcctcatcgcagccggtgatgaagacctgataaaaattcattttcataccaacgagccttggaaaatactggaatattgcagttccgtcggtgagatttttgatatcgtcgttgaagatatgatccgacagtcaaatggattacagggataaattgaacagataagggagtgccgaaagacactccctttttaataccgtgtattaatttttcccttattcttccatatacaccgcccgggttctctcctcatcatccacaaattctacatccgggaagcttgcaatatactgcttaaactgggaaaatccgtaatcccgtaccttaaaatctccaaatctcatacgaatacgatttcccagactactcagagggattccataacttccggcactttggatctgcaacaggatatattcttccagcatttctttccggctcttatcttcatagattgttaccgttaccttcgttccctcctgcatcagcatcagcttcggcaaagattccaaaaattttgataaaagactatatccatatcgacggacatcaaaatcaggatataattttaccagtctgcttccaacttctcccagtccggtctccctgtcattattctgattttccgtaataatcttgacaaccgcctcttcaattttttcctttgaaaccattgaatcatggttgtcctttttctgccattttcctgaagcatgagaatgggtattacgttcttcttttcccattgtattatcttcaagaagaagttccagttctgtaaaaatatcacacgcttttctgaacggcgacggagtctttccctctcccataccgatcacagtctttccgctttctctcagacggctcgccagctttgtaaaatcactgtcacttgaaaccaggcagaacccctccagttcactcgtataaagcatatccatcgcatcaatgatcatagcagaatcggttgcattttttccatgggtataactgaactgctggatcggagtgatcgaattctgaagaagttcttctttccagcttgcattattcgtctttgtccagtccccgtaaattctcttataagtcacattaccgtatttcgataattcatcaaggatcggtttaatatatttggcagatacattatccgcatcaatcaggagtgcgaaacggtcttccatgtctgatactcctccccggtaagatttttccacgcaaatgtaccattttcatagatcatataactatgctccgatccctctttcggaatcgagacagatcccggatttaaatactgatatgttccaccattcatatccaggatctctttacaggcaggaatatgcgtatgaccattcaaaagaatatctccatccttcaatggtggaagatgatgcggatgatagatgtgtccatgcgttgcaaatatcgttatatctccctgtccattctcccctgacagattcacgtaacaataatctgcaagaatcggaaattccaataccatctgatctacttctgtatcgcagtttcccctcacacacaataactcgcttttcaatggattcagcattgcaatcacttcttttggtgcatatccctccgggagatcattcctcggtccatgataaagaatatccccaagcaataataaccggtctgccccctccctcttatatgcctctatcatcttttcacaatagaatgccgaaccgtgaatatctgatgcaatcattaatttcatatcaattacctctttctttttaatcaatttcattttcacaacaaaaaactttcctgctcgatccctttcttctccttcaccagtttctccgccagttgccggagaaccggattttcaatctgcagtttcttcagcttttccaacgttgtgtcctctatcttttctgcgtagtcccggtatttttcataagtccgcacatccatcatcaacggctgcaattccgggaaaatattcttctgaatatacagaaatattttaattccgccataatcaagatctccgctatgataaaattcaacttctgtatgctcaagcacctgatttaaagactgtaaaaatctacattctttcggactgaaaaatccatgcgtaaaaatgtatagcgtatgctcttcccaaggcatcatcatataatttgctttattttcaatggtaatgaccctttggatttccggctgctgcccggcgatctgtgcataccgcagtgtatcactgttcagaatatttccataccgccagtcttcattatgaatctccgttccgtcctcccatttcaaatgcagcggacctttcaaagccagctcctgtgcataatcctcgatcagcagaaccgacagaatctccgaatcattcattgcatcatccagcagttccttcgcatatatttttgccgttgaaacaataaaatcctgaaattcattttcaaaaatctttgtatcttttaaatattttttgctgaagagccgcttatacatcggatcttccaattcatcaatcccacgccagcaggctcttcttttcctgaaaagtttccacgctttctccagagttgctttttttgctctgccactttccgattcctgcaacagcttttcataatacgctctgatccacggagtcctcagaacctgtagctctgcctggatttcttcctgatattttcgtactaattccgctcttgcacagaaatcagaatccactctttcccggtacagtttatacaatgccggaatatcctcctgccgataccggatcgcctgaatatcctgctcccgatagccctgtacccattcaatcttcacaagtcctgtcttctccagctctttagccgctttcacaacatccgacttcagatgtttccggtcatcgtacagatttcccgctttatttgacaaactcttccagccattcgctcccggtttccactgattctcactattttcaatcttttcgatcaaaagctgcaacagatactccatctctattcctcaaccttcaactggtcatactcaactttttcaaattcctggattgaaatatgctttttattcggatttgcatagacgaacgtcttgtctacattttccagataattctggatcttatcattcgtcgcactgatgattgcctgaaatcccagtccacggatcagagaaatacagcttgccactttctctgcgtccatcttggaaaatgcctcatccagcactacaagacggattgtagacggtctgcggatcttcggtgacagattgatcctgtagacctgtgcaaaacttgccagcagagcgatatacagcggattctgtccctctccgccggaatttttcttgatcatcttgctcagtccgatcttcatatccttttcaccgtggatgatctgctgcatatcaaaggataaatacgtccggtaatccgcatatttctccatattcttctttgcagtatccagttcctctcttgtcgcatcttccggcggaataaagatattgatcaactcgttcatcatatccccatattcctcatcgtgttccatggtaaaaaggttcatctgattttccatagaatccgaaagctgggacggattaatgctcaacgaatcatccatgaacattttataatatcttccgtccggtcctttattcttcgtaatgacaaactgatatttgtctttaccaaaatccagccgactgatgatacggttcagctcatctctccgctggtaggcttctttgatggcacttcgtatcttgtaaatgaaatcctctttaaaatgttctaccgctgattttgcctgttcctttgccgccagcctgaaatcttccagctcatcacactgcagttcagaaaggagcttttcataaggtgtattctcttcaatcgtaggagaaaatgtacggttcggatacagcttcagatagatggttctcctgtctacaagctgactgtatgccttgtccttctcaacttcaactgcgtccagttctttactccgctgctgtctgaggtactcataatttacagaacgcttcgtatccagataggcccggaatccttcttctttctgcggatcttcgtgaaattctttctgtctgtcctgcaattcggtttccacggtctgataaaaattctgatttcgctgtgcatttcctctgctctctgaaatctttccgatcagctcctccagctcctgcttgagctgtgcctgctgccgcaaaagatcttccttctgagctttcagagccgaaacctctccatcctggagtttcttcatctcttcctggatctgccgtttttctctttcctttttctgaatttcatcgatctctttcttccagctcatgtactcctctgccggttgggaaagtgcttctaatgtcagtaccctctgaatttcttccttcatttcctgcagcggaagacgttcctgctgtaaagcatcacaacgttcctccagtctgcggattctctgacgcatactggtttcaccgatatatgcccgccttgtataactttccgggttgatgtgctgcagacgatacccctgatacaacatacaatctgctgtgattccgatggtctgttcacgaagttcatcaattccatcacatttgatcacatttccaaggaagaaatcaatatacgcccggacatactcttctttcgccagcacctcctctgccagagaacctgcctttgcctttttatcactggaaaggaccttctctgtatccagcactgctgcccgtgaaaaccgcttcttatccattccctgataaatttccatggcatcttttacatagttcggttccactacgagcagaagtttattattgcccatatatccctcgatcgcattatgccatttttcatctcgcacatccagaagatctgcaaggatctgtaccggaacaagcctgccacaacgctcctgcagccgggtacgaagctcatattttgcttcctccacttccttcggatatgccttcctcccctgctttaattcctttaattcctctcttgcatccttttcttctttcttaatgactcttaactttgcttctgcatccttcagatcttcccccagttcttcccgaatctgtacaaggcttgtctgaagccgcttcaaagtttcctcatccagtgccacagtttcaaatttttcaatatcccaaagcgtctgattcggagtcacatcttttgatttccatgctgcaagccctgctgctgtcctctgccattttgcacggctcaactgcaaatgctccagcatctcattcacatttccaagcttctgttccaacgcagaatacccgctgttggcgatccttaacagcacttcctcatactgtccctggactgtctgctgctttgtctccagttctgcttttgcctgctcctgccgaccgatatcttcctgactctctttgatcttatcccgcagttcctgcagtttcgcctccagtcgtaagatttccagccggtcgatctgatactgatcattttcaacttccttcacctgggtctgatacacggcatatctgtcacggatctcttccaaatgccggatctccttcaacgtctcctcgatcttgctccgcattcttccatactgcatcacactttcctgcagatcctcaatatggatatcctgctccatacaaatatattctttcacaaaatcttccagcttgatattcatcttaaacgggattgcacgcttaaacagccgtggaaatttttccatatccagcccgcctaaataaatgtcataaagctgcttgcggaatctttcattactcggcccacagtaaaagtccgtcgtactgaaatttctctgcaaatattcccggatctctcctgttgtcagacaccgcttatctgcccggtaatcattttccagaagcccgcctttgtgccagaagaaaagacggctgatctcatttgtagctgtctctacatcaaatacaaccccgacgcactgactctgccggctttccgtttctgtaaattccagcacgatcgtactggagaaatttttatttctcaaatactgggactcattgttctcaccaatgttcaccattccccgcagatactcgatcagtgaccggtctgaatcatccgcagccgccttattaaaaaatcctcttccgtctgtattcgcatacagaacaagctgcatcgcatcgatcacggttgactttccacttcctgaatgccctgtaaagaaattgattccttcgtgaaagcttaatatttttctgtctatataatgccagttattcaggcatatcttcgatagtgccttgaactgctgtctcgtctccactgtattcctcctcactgaacgtacctaaaagttcccttacatcatcacccacaagaacggtattgatacacggataaatgaccatcctcgaattttcatccagctcttccatgacatccaacggctctaaaatctgatactttttcagcagtgcgatcgtcttacgcatttccgtcggagacggcatcccggtcagaatatgaaaatctcctgcctttccattgatcatcccgagggtcaccaccacatgattgctcgatgatacacttgccatctgctcatcataaaggatcttcagaatcagaatatagatcgttgcaagccttgaaagcttctctccccataatgcttcttcctgaatatagatcagccccatatgcacattctgccggagtgtgatccccgcaatccggaaatattctttcaggaaatccagatgccggtctgcaaaccggtactccctcaccggaaccatccttcctgcccggcggtcatatttcctttccagcagaaatgtctgacgcagcaataactgaatcaggtctctcatatcatcctgctcttcctcatttagtaaatcataatattctatcatcagggcctcctctgtataaatttcagatccggataacgatacctgccgttctccaccatcctgtcttcttcattcaacgcagcatatttgctgttccgacgtgtactgtaatcatacgcaaggatcagtttttcaaaatcctcatccgtcatatctttcattgcccctgcatccatgatatccccggtcatatgagcctggataaattcttcgatctccgcccggctgtatcgcatctgaatccggttcatcttcagtacctcttcacggttcagatcttccgtctcctcttccgtttccatcttactgatgaaatccgtccgactctttcttctcttatacaaagatttctctgacaggatctccagataagaaagattcatccgttccgctgccttccgcagcttctcctccttctttgcaccgttctcctctgccgaaatccgattcagaagctgtaccaccagcccctttgtatccgtctcaccgctgagcagatagttcagacgtgtcaccgtggcacgcacgtattttgtatgctctttatccatattggcaatccggtgttcaatatcatcaaatccacgctcaatctgatccaggatctccagcacatcttctttctcatccccggcagctttcgctcttgcacgcacgctttcgatccattcatcattctcccgcatttcccggagacatttcttaatatccatcttgtaaatataaaaattatccgaagtcttaagaatatgatatttcttccgcacaacctcttccacgtatccgtccaaatgctcccgaagcagttcaccatacgtcttcttatccagcagccgctcaaaaaacttatccatattatgaagcatatcctgcagggctttgttcaacttctttgtattcaccagggcagtccgcagcatattcaggttgactttcggattattctgaaatgaatacaacgtagcatagacattctgaatataaatatccgtctcttccagctcctgcgaagacagcttctcaaatgcctcaataaaaatcgccgcataatccgggatcacgatattcgttgtcagtgaagtataatcttcaattttttttaaccagcccgtcttcaccagccagttcagaatccgggaagaagtagtctccagcagatccagctccgtctctgactcctcacgctccagcctgatcctcttctgcgtattcatatcatttaagatctgcaggcagacttctctcgtcaggaaataattgctgtactcatattcctgattaatgcacagcagtgattctatataaatttctctattcaccgagcggaataagctccaaaatgtatccgggatttcataatgtgactgcatactgactccttactgtctttttctttaccgccttttctcacgtcgttctgtttttttattataccacagattcagcccgcctgcctgactactttctctttccccatctctgcatcacaagcacatacacgactgccgccccggtactcgccatggttgccagtatccctccgcctatgatccctgccggatcagcacttccatactgactcctgtaagcaataacattgaccgggatcagttgcagcgaagaaatattcaggatcagaaagatacacatttcatctcctgccacccctctttttctcactggcccaaaagctctgccaagtcttctgtcctcctccagctctcccagtgcttccatggctttcagtcctgcaggagttgccgcccagccaagtccaagaatatttgcaatgaaattgattgcgatctgttcatttgctttatttcccaccggaagctgcgggaaaaggaaccggatcaccggacgcagcttttccgcagccttttttacaagtcccgctttctccgcaatctccatgatcccacaccaaaatgccatcactcccagcatcgtaatgcacaatgacactgcatcttttgacgaatccagtgccgcatttgtcagctccggcattttcccgttccatgccccgaaaataattccgatcaggatcatccccgcccacagaccatttaacaactttacgccccctttttcttacgctcttgtgtcattattgtgcatagttccacatatacgtttcaaccacatcgaacggtgcaggtcctacactcagcactgcccggtgaaactctttctgactgaaatcctctcccattttttccgcccagcatttcttcaattccagaaatttgacatatccaatataatatttcagataattgcccggtgaaccaaggatcagatcgtagattttctgtatcgtttctgcatctgaaattccgtattttgcaaaaaaggctgtcgtatctatcctgctccagccatcataatggattcccatatctgccagtgcatataatgcaaggatcacggaaccatttttctgcaggatcgtagcctgttctttcggaagtggtgtcagataataactacacatttccgcataagttgcccatccctccacataaccgccaaaattgaaaatacttctgactggatcaggatctgtactttcataaaagattgtctgatataaatgccccggatacccttcatgggcaagcgttgtgaagagcgacagatcatcccgcatctgcccctgattgatatagatcacattttccctgctgttgtcgattgcaggaatcatataaaaagccggacttaaatgttcttccatttccttcggaacatacttgacttccaatgtagtgtccggtgtctccgggaatgctttttctatcccatccgacaattttttcaggatcagttccgctgtcccctgcttcatatctgccgcagattctttcgcttcttccacctttgcccccagtacgccctccatggcagtaatgtcatcttccatctgtctgcgtgtcagttcttccaactgcacgatcgattccttcgttcccacggactggtccaccaacacctgataatattcctgcccctgtggcagcccgcacagaccttcctcattttttcctgttcctttcagttcacgtactgctgccatcagcctttcataagcaggacagaccacttcttctataacctgtgcattttttttcgtatactcgcccatctcctcttccgtaaattttccgctttcccgcatccgctccacaaaagtagaatagagataatttccgtttcccatatccagaaatgcctgacattgttctatcactgcatctgccagtttctctgacataaaaagtcctttctccgattttccccgctcaaatgcaattacttcatcaaaataatttcctgttgatctcatcagatccaggtatgtatcagcatcctctttttcataaaaccggtattccgaaagcactaccggaagctgggtctgcacaccgctgactgtaccaagaggttcatcataccacaaatactctgcacttctttctgcactgtccaaataagattgcagaacatcataagtgatctggttttccacacttaatttatttttttcaaaagttatcaacgctttctccatattttccacaccggctttcaccgcctgttcatccgtgaccactgttccgtaaactgcaggagcggattcgatcccatattcctgcggatactttaatgtataatgcagactgactgcatttgccgatacttcactacagaacacttccctcgtatatgcttcaaatcgttcatcctcactgactgaactccctgccttcccattttcatctgctatttctgcacagccgccaaatcccagcacaactaaaaaaagccctgccacacagatctttctcatcctctgcatggtacagctcctttgttcctctttcttttcccagaatctcatagaacacttccgaaccattttctttcattttatgtatcgccctggcctcttattccatcagtctttgcattggtatattacatatattcaaaagaaatacatatatatctactaattgccccataatagaaagaggacaccccttgcacattcttctctacatctccaactactttatcccatttctgatcctttccatcatcatctgtggactgactgcaaaaattgatgtctatgaaacctttatcaccggtgcaaaaaatggctgccgtaccgtcatccggcttgtcccgactctgatcggactgatgactgcaacgggaatcctccgggcatccgggtttctcgacgtgatttcctctttcatcggaaaattcacgaatttgatcggatttcccggagaacttgtccctctttccattgtaaaaatgttctcgtcctctgctgcctccggtctgcttgttgatctctataaaacttacggaactgattcccggatcggactcatcgcctcactgtccatgtcctgtaccgaaaccattttttacactatgagtgtctactttatgactgccaggatccgccatacccgttatacgcttcccggagctgtttttgcaacctttgccggactcgccgccagcgtcctgctcgcaggttactattcctgattttcatgattcataactcccaacaccggtcaatcaacaacacatccattcaaaaccattgtttacatattccctttgtgctaaaattatgctaacaagatttctatggatggaggcatgatgatgtctgatataatgtttgaacacctgaccaaaacttatcccaacggattcatctccgttgatgatgttactttaaaaattcaggacggagaatttgtcgtatttcatggaccgagcggctgtggcaagtccacgattcttcggatgatcggcggactggaagatatcacatcaggaaagatctatcttggtgatgaactgcttaatgatattctgccacgcgacagaaagctggccatggcattccagaattatctgctttataaatatctgaatgtctatgaaaatatggctcttggtctccggctgcgagattttccgagaaatgtcatcgacaaccgtgtcaacactgcggcacaattcctcggaatctctgctattcttcatgaaaagatcaaaaatatttctgatgcagagaagcagcgggtcgcacttggacgtgcaatcgtctgccacccgaaagtactccttgttgatgaggattttgcacatcagaacgatgatcgacgtcatgagatgctcagcgacatcttacgcatcaacaaagaactcggtataaccgtcctgtatgtgacaaatgaccctgaagaagctctctccctggattcccgcattattttcatgagagatggaaagattgaagaagaccgcagagtataataaagctgcatccgcaggaacattcagccggctgattattccagctcctgaatctttcctgcggatgcagctttttactcttttatcttttcaagataattataaacttcccgcttctgcattccccggtcttttgcggtctgcttcatggcatctttccggttcatcccctgtgcgagataatgttccatatgctcctcaatgctcatctcttcccaacgtgcctgttcctcctgccgcatctcttctctgctgcgtccctcgatcaccagcacacattcccctttcggatcatttgcttcgtaataagccaccgcttcagggatggttgtcagaaatgcagtttcatgcttcttcgtcagctctcggcaaaccgtgatccgccgctctcccagacgttcagccagcagttttaatgtcttcaccagccggtgcggagcttcatacataacaatcgttctcgtctccgtctccagctctgtcagcactgcctcccgctcttttttatctggcggaagaaacgcctcaaatgcaaaacgtcttgtcccaagtcccgacatcgtcaacgctgtcacgcatgcagccggccccggtactgaactgactcttactcctgcctcatagcacatcttcaccagctcttcccccgggtctgaaattcccggagttcctgcatccgtgatcacagcgatattcataccatccagcagcttctcaaccagcttttttcccttttcatacttattaaactcatgataactcgtcatgggagtctgtatctcaaaatggttcagcagcttgatactattccgtgtatcttctgctgcgatcagatcaacttctttcagaacccggactgcccggaacgtcatatcctccagatttccaatcggtgtcgccaccaggtataagattcctgccatttcaacctcctgtatgcccatatccattctccatccgcagacctccatccctggagtacatgatcagaggcggttcgatcttcactctcggcttcgctccccgcattccttccacaagcaccatcgttggctctttatcaagatacggatgaacaaactgaatcctctttggctcaatcttgtactgactcatcttcgtcaggatctccgtcagccggaacggtcggtggatcatataaaatctgcccttatcctgcaaaagacgcatactctcccgcaaaatatcatccaatgtacacaagacttcatgccttgcgatcgcctttctgtcatctggattcctgagtccatgctctgccagcatataaggtggattcgtcgtgatcacatcaaaaaaagccggtttgaaaattgttgcggcctcctttatatctccggtcacaatctccactctgtcctccaagtgattataacggacacttctctgtgccatctcagccgtatctgcctgaatctccagtccggtaaaatgctttccctctgtctttccagccaaaagaacagggataattccattccctgttcccatatcaagtaccgtttctccctgacgcacctttgcaaagtctgaaagaagaaccgcatccacaccaaagcagaacttgtccggatcctggatcagtcccagaccaccaagctgaagatcatctaacctctcgccctgctttaacagattactttccattttcttttgaatctccatctttcttaggatttttctttttcctgcgaggacggaacttcagatctgtcgctttatactcccggatctctttctcatcatcctccagatttacgaccactttcaccagtccacgcagaacacttaaggactgcacaactcccgtaagtccatctgaagttgtcaccatatctcccacagacggaagctggctgttcaaaacctcatacgtttcctcctcgttcgtcagacagcacatcaaacggccacagacacctgatatctttgtcggattcagagaaagattctgttcctttgccattttgatagaaaccgctgcaaattcagtcagataggtgctgcaacaaagcggacgaccacagattcccagtccaccacggatcttcgtctcatcacgcacgccaatctgcctcagttcaatccttgtcctgaatacagccgccagatctttcaccagctcacggaaatcaatccttccgtctgccgtaaaataaaaaagtactttattattatcaaatgtatactctgcatcgatcagcttcatgtccagattatgcttccgaatcttttcctgacagatcttaaatgcctctttttctttctgatgattctcttcgacagtccgcttatcctcgtccgttgcaattcggattaccgacttcaatggctgaacaaccgaatcgtcacttacctccttcggaccgctcacaacccgcccgtactccacaccccgggcagtttctacaatgacatggtcaccctgcttcacagcaaactgtcccggtgaaaagaaataaatctttcccgcagtacgaaacctaacgcctattacatttatcatactaattaattctcctttattgtcagtaacagcagctcgatcaccagctcgaagtttacatttgctttcattcgtgccttcgccgtctcaagtgcctcaagtattttttcaattccctcataagagctcttgctggcacgggctttgatataacgaagctgatccgaaaatacgacccggtccacattcttcgtcgctttataaatcagtacatctctgtaccatattgccatcatatcaagataatcattgatctccagcttataagtcatgcactttttcactgcatccatcaattcagggacatccatctcgtcaatatttctcagtaaatgaacgacctcttctttgatctcattaaaataatctgaattggcaagcatgattgcttttcccatatttccctgtgcaaatgccacacatacatccgctttataatctgggatctccatctgctccatcagatacttcttcacaagctgatccttgatatttctcagcttcatcataacacatctcgaacggatcgttggcagcagcacctctgcattttctgtcagcagcatgataaccgcatactccggtggctcttcaatcgtcttcaaaagagcattctgtgcctgtacgctcatcagatccgcttctgggatgatataaattttatacttactgctataaggcttgattacaatatcattattaacctgctgtctgatatcatcaacactgatcgtggttggcttctcatgtgacacacggacaatatccggctgatttccatgcaatgcctgcttacaggactggcattttccacatgcctctccgttctcatcacgatcctgacactgcagactcatagcaaaaagattcgccagaagcttctttcccgaaccacgttcaccattcaatatatacgcatgggaaaccgcatccgcctggaccgcactctcaatatacttgattatattcttatgtcctactacatctttaaaactactcatttctatcacctgccacacataaaattatacactttcagtataccacaatcttataggaagtcacaccccctaatttccctttcaatggcttcgatgcactcctccagatccacattctgaaatcttttttctatccctgctgctctcagattttcctcagaaaaatcttttgaatccgccagaaaccgtcggcacaattcatcatacctgggctgactctgtctcttttcccgctctaatgcccttgtcaaccgcagtccgtcttctacttcaatataaagaggaaccagactttctgctccaaaatactctttcattgcccgataggattcaagcgtcccaatcaccagataatcctcctgtctcagattgatctgtccgtcgtccgctgtaaaataactccataccccatactgcgtatggtaagatctttcctcgatcaactgcccctgcttcctgaattgctgcaatttttcttcatctgtgaaaaaatattctacaccatcacattctccttctcttctcggacgtgttgtatacaatacaatccttttcattttgggaaatccttgaagcagttctttataaatcgtatcttttccggaagaactcttacccatcaggtaaaatatcttacccatttttcaaaacctccagtctgtcctttttcttcgttccttcaatggtaaaaccattcttctcataatccagaatctgctgcacagcttcttccgaaactctctctcccggtacaacaatcggaatacccggtggatataaataaacaaattccaatgaaaccttccccgcagcttcctgccatggaacagccagtccttttcgtcctttcacctttgcactttccactactctttctgccggaataagcggatgcctgcaaaatcccggatcttttttcatcgtagctgcatccatttttctatttcctgatagtacttcatccaggttcttatcctgtttcctgttcccctgcagtacttcatccaatctcttatctaaattccttagtgcattgagcaaccggttcattccttcctgcgtatctcccggtccggtcattgcaatcacataagaacccgctgccatctccatctgtaaatgatcgttttccaaaaggatttcctgcaattctttgccactcattcttcccctcgcagaaatcacaatcttagaagcatcatactgcatcgtttccagtaattgaagattcttcagttttccaatttcctttcttaactggcagagcatttccacataaggtttaaaaaccttttccctttcctcgtcgaccagtcggatacattcatcaatcgaagccattaaaatataagaagggctgctgctctgaagcatatgaagatatcgtctcacactatctcgatctacaagctttccattcatgtgcagcagtgccgtctgcgtcagtgacggaagtgtcttgtgaagactgtggatcactatatcggctcctcttacatttgcattttggggaaaatactcatgaaatccgaaatgagccccatgtgcttcatccacaatcagcggaatcccatacttatgaaccacttcactgatccgctcaatatccgataccacaccatcataagtcggtgaagtgatcactaccgcctttattccggcttcccggttcatccccctgtccttttccaggatctgttctattttttctacccggatctctccattaagatctgtagtttcgtcaaattcaggataaacatactccggaatcaacccatttaagtctactgcattgtaaacagatttatgacaatttctcgccatcaaaatcctgtctccgtatccggtacatccaagtactgcactcaaaagtcccacagtacttccatttaccagataatgcgtttcctctgcgtgaaaaacttctgccgcatactcctgcaagtttataaaaagatcttctgcatgatgcagatcatcaaatccttcaatttccgtaatatcaatttcataaggaagtttctctgctccagtgatctgttgtcgcttatgtccgggcatatgaaatccataataatctgatacactgtactttactaatttatcatataaatgttccatataaacctcttactttcctaataaaaaaaccagcaaactcaacagtttactggtcctaagtgagcgtgcggggattcgaaccccggacaacttgattaaaagtcaagtgctctaccacctgagctacacgcccttaaatactcacaaaatttatattatcatacctataacataaatgcaagaactttttattctattcatatttaaagttaggcataaaaaatgcccagagccggaatcgaaccagcgacacgaggattttcagtcctctgctctaccaactgagctatctgggcatagactttataaaagtctgagttgcgggagcaggatttgaacctgcgaccttcgggttatgagcccgacgagcttccagactgctccatcccgcgatattaaattaaattctcataagagaaaagccgatgatcggactcgaaccgataacctgctgattacaaatcagctgctctgccaattgagccacatcggcttatagcttaagcccgaaggctaaatggatggaggtggattcgaaccaccgaagcaatttgcagcagatttacagtctgtcccctttggccactcgggaatccatccatattttgttaagtgggacctacagggctcgaacctgtgaccctctgcttgtaaggcagatgctctcccagctgagctaagatcccacataacgacccagaagagactcgaactctcgaccttcgccgtgacagggcgacgctctaaccaactgagccactgggccattcttcaatttttcaagatattgatataccttgaaaactacatacagttaaaaccaacatcatcatccatttacctatcactgctttggttatgccctcgacctattagtaacagtcagctccatgtgttaccacacttccacctctgccctatctacctcgtcgtcttcaaggggtcttactaacttgacgttatgagatatctcatcttgaggggggcttcacgcttagatgccttcagcgtttatcccttcccggcttggctactctgctatgcctttggta
